United States Patent Application Publication US 2026/0250371 A1, published August 27, 2026 (application 19/163,370).

The application's sequence listing, which the Patent Office published only in electronic form, follows.

SEQUENCE LISTING (1853 sequences)

SEQ ID NO: 1 - protein, 447 aa, synthetic construct
  source 1..447: note = Burosumab Heavy Chain
QVQLVQSGAEVKKPGASVKVSCKASGYTFTNHYMHWVRQAPGQGLEWMGIINPISGSTSNAQKFQGRVTMTRDTSTSTVYMELSSLRSEDTAVYYCARDIVDAFDFWGQGTMVTVSSASTKGPSVFPLAPSSKSTSGGTAALGCLVKDYFPEPVTVSWNSGALTSGVHTFPAVLQSSGLYSLSSVVTVPSSSLGTQTYICNVNHKPSNTKVDKKVEPKSCDKTHTCPPCPAPELLGGPSVFLFPPKPKDTLMISRTPEVTCVVVDVSHEDPEVKFNWYVDGVEVHNAKTKPREEQYNSTYRVVSVLTVLHQDWLNGKEYKCKVSNKALPAPIEKTISKAKGQPREPQVYTLPPSRDELTKNQVSLTCLVKGFYPSDIAVEWESNGQPENNYKTTPPVLDSDGSFFLYSKLTVDKSRWQQGNVFSCSVMHEALHNHYTQKSLSLSPGK

SEQ ID NO: 2 - protein, 213 aa, synthetic construct
  source 1..213: note = Burosumab Light Chain
AIQLTQSPSSLSASVGDRVTITCRASQGISSALVWYQQKPGKAPKLLIYDASSLESGVPSRFSGSGSGTDFTLTISSLQPEDFATYYCQQFNDYFTFGPGTKVDIKRTVAAPSVFIFPPSDEQLKSGTASVVCLLNNFYPREAKVQWKVDNALQSGNSQESVTEQDSKDSTYSLSSTLTLSKADYEKHKVYACEVTHQGLSSPVTKSFNRGEC

SEQ ID NO: 3 - protein, 117 aa, synthetic construct
  source 1..117: note = VH-001_Burosumab Heavy Chain Variable Region
QVQLVQSGAEVKKPGASVKVSCKASGYTFTNHYMHWVRQAPGQGLEWMGIINPISGSTSNAQKFQGRVTMTRDTSTSTVYMELSSLRSEDTAVYYCARDIVDAFDFWGQGTMVTVSS

SEQ ID NO: 4 - protein, 107 aa, synthetic construct
  source 1..107: note = VL-001_Burosumab Light Chain Variable Region
AIQLTQSPSSLSASVGDRVTITCRASQGISSALVWYQQKPGKAPKLLIYDASSLESGVPSRFSGSGSGTDFTLTISSLQPEDFATYYCQQFNDYFTFGPGTKVDIKR

SEQ ID NO: 5 - protein, 12 aa, synthetic construct
  source 1..12: note = Burosumab heavy chain paratope region 1
ASGYTFTNHYMH

SEQ ID NO: 6 - protein, 21 aa, synthetic construct
  source 1..21: note = Burosumab heavy chain paratope region 2
GIINPISGSTSNAQKFQGRVT

SEQ ID NO: 7 - protein, 16 aa, synthetic construct
  source 1..16: note = Burosumab heavy chain paratope region 3
DYFPEPVTVSWNSGAL

SEQ ID NO: 8 - protein, 11 aa, synthetic construct
  source 1..11: note = Burosumab light chain paratope region 1
CRASQGISSAL

SEQ ID NO: 9 - protein, 21 aa, synthetic construct
  source 1..21: note = Burosumab light chain paratope region 2
DASSLESGVPSRFSGSGSGTD

SEQ ID NO: 10 - protein, 20 aa, synthetic construct
  source 1..20: note = Burosumab light chain paratope region 3
VDIKRTVAAPSVFIFPPSDE

SEQ ID NO: 11 - protein, 5 aa, synthetic construct
  source 1..5: note = HCDR1-001_Burosumab heavy chain CDR1
NHYMH

SEQ ID NO: 12 - protein, 17 aa, synthetic construct
  source 1..17: note = HCDR2-001_Burosumab heavy chain CDR2
IINPISGSTSNAQKFQG

SEQ ID NO: 13 - protein, 8 aa, synthetic construct
  source 1..8: note = HCDR3-001_Burosumab heavy chain CDR3
DIVDAFDF

SEQ ID NO: 14 - protein, 11 aa, synthetic construct
  source 1..11: note = LCDR1-001_Burosumab light chain CDR1
RASQGISSALV

SEQ ID NO: 15 - protein, 7 aa, synthetic construct
  source 1..7: note = LCDR2-001_Burosumab light chain CDR2
DASSLES

SEQ ID NO: 16 - protein, 8 aa, synthetic construct
  source 1..8: note = LCDR3-001_Burosumab light chain CDR3
QQFNDYFT

SEQ ID NO: 17 - protein, 251 aa, Homo sapiens
  source 1..251: note = Human FGF23 (UniProt Accession No. Q9GZV9)
MLGARLRLWVCALCSVCSMSVLRAYPNASPLLGSSWGGLIHLYTATARNSYHLQIHKNGHVDGAPHQTIYSALMIRSEDAGFVVITGVMSRRYLCMDFRGNIFGSHYFDPENCRFQHQTLENGYDVYHSPQYHFLVSLGRAKRAFLPGMNPPPYSQFLSRRNEIPLIHFNTPIPRRHTRSAEDDSERDPLNVLKPRARMTPAPASCSQELPSAEDNSPMASDPLGVVRGGRVNTHAGGTGPEGCRPFAKFI

SEQ ID NO: 18 - protein, 251 aa, Homo sapiens
  source 1..251: note = Human FGF23 (R179Q)
MLGARLRLWVCALCSVCSMSVLRAYPNASPLLGSSWGGLIHLYTATARNSYHLQIHKNGHVDGAPHQTIYSALMIRSEDAGFVVITGVMSRRYLCMDFRGNIFGSHYFDPENCRFQHQTLENGYDVYHSPQYHFLVSLGRAKRAFLPGMNPPPYSQFLSRRNEIPLIHFNTPIPRRHTQSAEDDSERDPLNVLKPRARMTPAPASCSQELPSAEDNSPMASDPLGVVRGGRVNTHAGGTGPEGCRPFAKFI

SEQ ID NO: 19 - protein, 28 aa, Homo sapiens
  source 1..28: note = Human FGF23 protected region 1
YTATARNSYHLQIHKNGHVDGAPHQTIY

SEQ ID NO: 20 - protein, 13 aa, Homo sapiens
  source 1..13: note = Human FGF23 protected region 2
AGFVVITGVMSRR

SEQ ID NO: 21 - protein, 23 aa, Homo sapiens
  source 1..23: note = Human FGF23 protected region 3
LVSLGRAKRAFLPGMNPPPYSQF

SEQ ID NO: 22 - protein, 5 aa, synthetic construct
  source 1..5: note = HCDR1-002
DHYMH

SEQ ID NO: 23 - protein, 5 aa, synthetic construct
  source 1..5: note = HCDR1-003
EHYMH

SEQ ID NO: 24 - protein, 5 aa, synthetic construct
  source 1..5: note = HCDR1-004
FHYMH

SEQ ID NO: 25 - protein, 5 aa, synthetic construct
  source 1..5: note = HCDR1-005
QHYMH

SEQ ID NO: 26 - protein, 5 aa, synthetic construct
  source 1..5: note = HCDR1-006
RHYMH

SEQ ID NO: 27 - protein, 5 aa, synthetic construct
  source 1..5: note = HCDR1-007
YHYMH

SEQ ID NO: 28 - protein, 5 aa, synthetic construct
  source 1..5: note = HCDR1-008
NHEMH

SEQ ID NO: 29 - protein, 5 aa, synthetic construct
  source 1..5: note = HCDR1-009
NHFMH

SEQ ID NO: 30 - protein, 5 aa, synthetic construct
  source 1..5: note = HCDR1-010
NHQMH

SEQ ID NO: 31 - protein, 5 aa, synthetic construct
  source 1..5: note = HCDR1-011
NHSMH

SEQ ID NO: 32 - protein, 5 aa, synthetic construct
  source 1..5: note = HCDR1-012
NHTMH

SEQ ID NO: 33 - protein, 17 aa, synthetic construct
  source 1..17: note = HCDR2-002
IIFPISGSTSNAQKFQG

SEQ ID NO: 34 - protein, 17 aa, synthetic construct
  source 1..17: note = HCDR2-003
IIYPISGSTSNAQKFQG

SEQ ID NO: 35 - protein, 17 aa, synthetic construct
  source 1..17: note = HCDR2-004
IINPFSGSTSNAQKFQG

SEQ ID NO: 36 - protein, 17 aa, synthetic construct
  source 1..17: note = HCDR2-005
IINPYSGSTSNAQKFQG

SEQ ID NO: 37 - protein, 17 aa, synthetic construct
  source 1..17: note = HCDR2-006
IINPISGSTDNAQKFQG

SEQ ID NO: 38 - protein, 17 aa, synthetic construct
  source 1..17: note = HCDR2-007
IINPISGSTENAQKFQG

SEQ ID NO: 39 - protein, 17 aa, synthetic construct
  source 1..17: note = HCDR2-008
IINPISGSTFNAQKFQG

SEQ ID NO: 40 - protein, 17 aa, synthetic construct
  source 1..17: note = HCDR2-009
IINPISGSTINAQKFQG

SEQ ID NO: 41 - protein, 17 aa, synthetic construct
  source 1..17: note = HCDR2-010
IINPISGSTLNAQKFQG

SEQ ID NO: 42 - protein, 17 aa, synthetic construct
  source 1..17: note = HCDR2-011
IINPISGSTQNAQKFQG

SEQ ID NO: 43 - protein, 17 aa, synthetic construct
  source 1..17: note = HCDR2-012
IINPISGSTTNAQKFQG

SEQ ID NO: 44 - protein, 17 aa, synthetic construct
  source 1..17: note = HCDR2-013
IINPISGSTVNAQKFQG

SEQ ID NO: 45 - protein, 17 aa, synthetic construct
  source 1..17: note = HCDR2-014
IINPISGSTYNAQKFQG

SEQ ID NO: 46 - protein, 17 aa, synthetic construct
  source 1..17: note = HCDR2-015
DINPISGSTSNAQKFQG

SEQ ID NO: 47 - protein, 17 aa, synthetic construct
  source 1..17: note = HCDR2-016
EINPISGSTSNAQKFQG

SEQ ID NO: 48 - protein, 17 aa, synthetic construct
  source 1..17: note = HCDR2-017
FINPISGSTSNAQKFQG

SEQ ID NO: 49 - protein, 17 aa, synthetic construct
  source 1..17: note = HCDR2-018
SINPISGSTSNAQKFQG

SEQ ID NO: 50 - protein, 17 aa, synthetic construct
  source 1..17: note = HCDR2-019
TINPISGSTSNAQKFQG

SEQ ID NO: 51 - protein, 17 aa, synthetic construct
  source 1..17: note = HCDR2-020
YINPISGSTSNAQKFQG

SEQ ID NO: 52 - protein, 17 aa, synthetic construct
  source 1..17: note = HCDR2-021
IIEPISGSTSNAQKFQG

SEQ ID NO: 53 - protein, 17 aa, synthetic construct
  source 1..17: note = HCDR2-022
IIQPISGSTSNAQKFQG

SEQ ID NO: 54 - protein, 17 aa, synthetic construct
  source 1..17: note = HCDR2-023
IINPESGSTSNAQKFQG

SEQ ID NO: 55 - protein, 17 aa, synthetic construct
  source 1..17: note = HCDR2-024
IINPLSGSTSNAQKFQG

SEQ ID NO: 56 - protein, 17 aa, synthetic construct
  source 1..17: note = HCDR2-025
IINPQSGSTSNAQKFQG

SEQ ID NO: 57 - protein, 17 aa, synthetic construct
  source 1..17: note = HCDR2-026
IINPSSGSTSNAQKFQG

SEQ ID NO: 58 - protein, 17 aa, synthetic construct
  source 1..17: note = HCDR2-027
IINPTSGSTSNAQKFQG

SEQ ID NO: 59 - protein, 17 aa, synthetic construct
  source 1..17: note = HCDR2-028
IINPVSGSTSNAQKFQG

SEQ ID NO: 60 - protein, 17 aa, synthetic construct
  source 1..17: note = HCDR2-029
IINPIEGSTSNAQKFQG

SEQ ID NO: 61 - protein, 17 aa, synthetic construct
  source 1..17: note = HCDR2-030
IINPIFGSTSNAQKFQG

SEQ ID NO: 62 - protein, 17 aa, synthetic construct
  source 1..17: note = HCDR2-031
IINPIQGSTSNAQKFQG

SEQ ID NO: 63 - protein, 17 aa, synthetic construct
  source 1..17: note = HCDR2-032
IINPISGETDNAQKFQG

SEQ ID NO: 64 - protein, 17 aa, synthetic construct
  source 1..17: note = HCDR2-033
IINPITGSTSNAQKFQG

SEQ ID NO: 65 - protein, 17 aa, synthetic construct
  source 1..17: note = HCDR2-034
IINPIYGSTSNAQKFQG

SEQ ID NO: 66 - protein, 8 aa, synthetic construct
  source 1..8: note = HCDR3-002
EIVDAFDF

SEQ ID NO: 67 - protein, 8 aa, synthetic construct
  source 1..8: note = HCDR3-003
QIVDAFDF

SEQ ID NO: 68 - protein, 8 aa, synthetic construct
  source 1..8: note = HCDR3-004
YIVDAFDF

SEQ ID NO: 69 - protein, 8 aa, synthetic construct
  source 1..8: note = HCDR3-005
DLVDAFDF

SEQ ID NO: 70 - protein, 8 aa, synthetic construct
  source 1..8: note = HCDR3-006
DQVDAFDF

SEQ ID NO: 71 - protein, 8 aa, synthetic construct
  source 1..8: note = HCDR3-007
DVVDAFDF

SEQ ID NO: 72 - protein, 8 aa, synthetic construct
  source 1..8: note = HCDR3-008
DYVDAFDF

SEQ ID NO: 73 - protein, 8 aa, synthetic construct
  source 1..8: note = HCDR3-009
DITDAFDF

SEQ ID NO: 74 - protein, 8 aa, synthetic construct
  source 1..8: note = HCDR3-010
DIYDAFDF

SEQ ID NO: 75 - protein, 8 aa, synthetic construct
  source 1..8: note = HCDR3-011
DIVEAFDF

SEQ ID NO: 76 - protein, 8 aa, synthetic construct
  source 1..8: note = HCDR3-012
DIVFAFDF

SEQ ID NO: 77 - protein, 8 aa, synthetic construct
  source 1..8: note = HCDR3-013
DIVIAFDF

SEQ ID NO: 78 - protein, 8 aa, synthetic construct
  source 1..8: note = HCDR3-014
DIVLAFDF

SEQ ID NO: 79 - protein, 8 aa, synthetic construct
  source 1..8: note = HCDR3-015
DIVQAFDF

SEQ ID NO: 80 - protein, 8 aa, synthetic construct
  source 1..8: note = HCDR3-016
DIVYAFDF

SEQ ID NO: 81 - protein, 8 aa, synthetic construct
  source 1..8: note = HCDR3-017
DIVDEFDF

SEQ ID NO: 82 - protein, 8 aa, synthetic construct
  source 1..8: note = HCDR3-018
DIVDQFDF

SEQ ID NO: 83 - protein, 8 aa, synthetic construct
  source 1..8: note = HCDR3-019
DIVDYFDF

SEQ ID NO: 84 - protein, 8 aa, synthetic construct
  source 1..8: note = HCDR3-020
DDVDAFDF

SEQ ID NO: 85 - protein, 8 aa, synthetic construct
  source 1..8: note = HCDR3-021
DEVDAFDF

SEQ ID NO: 86 - protein, 8 aa, synthetic construct
  source 1..8: note = HCDR3-022
DFVDAFDF

SEQ ID NO: 87 - protein, 8 aa, synthetic construct
  source 1..8: note = HCDR3-023
DIFDAFDF

SEQ ID NO: 88 - protein, 8 aa, synthetic construct
  source 1..8: note = HCDR3-024
DIIDAFDF

SEQ ID NO: 89 - protein, 8 aa, synthetic construct
  source 1..8: note = HCDR3-025
DILDAFDF

SEQ ID NO: 90 - protein, 8 aa, synthetic construct
  source 1..8: note = HCDR3-026
DIVDDFDF

SEQ ID NO: 91 - protein, 8 aa, synthetic construct
  source 1..8: note = HCDR3-027
DIVDFFDF

SEQ ID NO: 92 - protein, 8 aa, synthetic construct
  source 1..8: note = HCDR3-028
DIVDSFDF

SEQ ID NO: 93 - protein, 8 aa, synthetic construct
  source 1..8: note = HCDR3-029
DIVDTFDF

SEQ ID NO: 94 - protein, 11 aa, synthetic construct
  source 1..11: note = LCDR1-002
RASQGFSSALV

SEQ ID NO: 95 - protein, 11 aa, synthetic construct
  source 1..11: note = LCDR1-003
RASQGLSSALV

SEQ ID NO: 96 - protein, 11 aa, synthetic construct
  source 1..11: note = LCDR1-004
RASQGIDSALV

SEQ ID NO: 97 - protein, 11 aa, synthetic construct
  source 1..11: note = LCDR1-005
RASQGIESALV

SEQ ID NO: 98 - protein, 11 aa, synthetic construct
  source 1..11: note = LCDR1-006
RASQGIFSALV

SEQ ID NO: 99 - protein, 11 aa, synthetic construct
  source 1..11: note = LCDR1-007
RASQGILSALV

SEQ ID NO: 100 - protein, 11 aa, synthetic construct
  source 1..11: note = LCDR1-008
RASQGIQSALV

SEQ ID NO: 101 - protein, 11 aa, synthetic construct
  source 1..11: note = LCDR1-009
RASQGIYSALV

SEQ ID NO: 102 - protein, 11 aa, synthetic construct
  source 1..11: note = LCDR1-010
RASQGISDALV

SEQ ID NO: 103 - protein, 11 aa, synthetic construct
  source 1..11: note = LCDR1-011
RASQGISEALV

SEQ ID NO: 104 - protein, 11 aa, synthetic construct
  source 1..11: note = LCDR1-012
RASQGISFALV

SEQ ID NO: 105 - protein, 11 aa, synthetic construct
  source 1..11: note = LCDR1-013
RASQGISQALV

SEQ ID NO: 106 - protein, 11 aa, synthetic construct
  source 1..11: note = LCDR1-014
RASQGISYALV

SEQ ID NO: 107 - protein, 11 aa, synthetic construct
  source 1..11: note = LCDR1-015
RASQGISSFLV

SEQ ID NO: 108 - protein, 11 aa, synthetic construct
  source 1..11: note = LCDR1-016
RASQGISSVLV

SEQ ID NO: 109 - protein, 11 aa, synthetic construct
  source 1..11: note = LCDR1-017
RASQGISSALF

SEQ ID NO: 110 - protein, 11 aa, synthetic construct
  source 1..11: note = LCDR1-018
RASQGISSALI

SEQ ID NO: 111 - protein, 11 aa, synthetic construct
  source 1..11: note = LCDR1-019
RLSQGISSALV

SEQ ID NO: 112 - protein, 11 aa, synthetic construct
  source 1..11: note = LCDR1-020
RVSQGISSALV

SEQ ID NO: 113 - protein, 11 aa, synthetic construct
  source 1..11: note = LCDR1-021
RASQGVSSALV

SEQ ID NO: 114 - protein, 11 aa, synthetic construct
  source 1..11: note = LCDR1-022
RASQGIISALV

SEQ ID NO: 115 - protein, 11 aa, synthetic construct
  source 1..11: note = LCDR1-023
RASQGITSALV

SEQ ID NO: 116 - protein, 11 aa, synthetic construct
  source 1..11: note = LCDR1-024
RASQGIVSALV

SEQ ID NO: 117 - protein, 11 aa, synthetic construct
  source 1..11: note = LCDR1-025
RASQGISIALV

SEQ ID NO: 118 - protein, 11 aa, synthetic construct
  source 1..11: note = LCDR1-026
RASQGISLALV

SEQ ID NO: 119 - protein, 11 aa, synthetic construct
  source 1..11: note = LCDR1-027
RASQGISTALV

SEQ ID NO: 120 - protein, 11 aa, synthetic construct
  source 1..11: note = LCDR1-028
RASQGISVALV

SEQ ID NO: 121 - protein, 11 aa, synthetic construct
  source 1..11: note = LCDR1-029
RASQGISSILV

SEQ ID NO: 122 - protein, 11 aa, synthetic construct
  source 1..11: note = LCDR1-030
RASQGISSLLV

SEQ ID NO: 123 - protein, 11 aa, synthetic construct
  source 1..11: note = LCDR1-031
RASQGISSTLV

SEQ ID NO: 124 - protein, 11 aa, synthetic construct
  source 1..11: note = LCDR1-032
RASQGISSYLV

SEQ ID NO: 125 - protein, 11 aa, synthetic construct
  source 1..11: note = LCDR1-033
RASQGISSALL

SEQ ID NO: 126 - protein, 11 aa, synthetic construct
  source 1..11: note = LCDR1-034
RASQGISSALY

SEQ ID NO: 127 - protein, 7 aa, synthetic construct
  source 1..7: note = LCDR2-002
FASSLES

SEQ ID NO: 128 - protein, 7 aa, synthetic construct
  source 1..7: note = LCDR2-003
LASSLES

SEQ ID NO: 129 - protein, 7 aa, synthetic construct
  source 1..7: note = LCDR2-004
QASSLES

SEQ ID NO: 130 - protein, 7 aa, synthetic construct
  source 1..7: note = LCDR2-005
RASSLES

SEQ ID NO: 131 - protein, 7 aa, synthetic construct
  source 1..7: note = LCDR2-006
SASSLES

SEQ ID NO: 132 - protein, 7 aa, synthetic construct
  source 1..7: note = LCDR2-007
TASSLES

SEQ ID NO: 133 - protein, 7 aa, synthetic construct
  source 1..7: note = LCDR2-008
VASSLES

SEQ ID NO: 134 - protein, 7 aa, synthetic construct
  source 1..7: note = LCDR2-009
DVSSLES

SEQ ID NO: 135 - protein, 7 aa, synthetic construct
  source 1..7: note = LCDR2-010
DADSLES

SEQ ID NO: 136 - protein, 7 aa, synthetic construct
  source 1..7: note = LCDR2-011
DAESLES

SEQ ID NO: 137 - protein, 7 aa, synthetic construct
  source 1..7: note = LCDR2-012
DAFSLES

SEQ ID NO: 138 - protein, 7 aa, synthetic construct
  source 1..7: note = LCDR2-013
DASDLES

SEQ ID NO: 139 - protein, 7 aa, synthetic construct
  source 1..7: note = LCDR2-014
DASELES

SEQ ID NO: 140 - protein, 7 aa, synthetic construct
  source 1..7: note = LCDR2-015
DASFLES

SEQ ID NO: 141 - protein, 7 aa, synthetic construct
  source 1..7: note = LCDR2-016
DASRLES

SEQ ID NO: 142 - protein, 7 aa, synthetic construct
  source 1..7: note = LCDR2-017
DASYLES

SEQ ID NO: 143 - protein, 7 aa, synthetic construct
  source 1..7: note = LCDR2-018
EASSLES

SEQ ID NO: 144 - protein, 7 aa, synthetic construct
  source 1..7: note = LCDR2-019
IASSLES

SEQ ID NO: 145 - protein, 7 aa, synthetic construct
  source 1..7: note = LCDR2-020
DFSSLES

SEQ ID NO: 146 - protein, 7 aa, synthetic construct
  source 1..7: note = LCDR2-021
DISSLES

SEQ ID NO: 147 - protein, 7 aa, synthetic construct
  source 1..7: note = LCDR2-022
DLSSLES

SEQ ID NO: 148 - protein, 7 aa, synthetic construct
  source 1..7: note = LCDR2-023
DSSSLES

SEQ ID NO: 149 - protein, 7 aa, synthetic construct
  source 1..7: note = LCDR2-024
DTSSLES

SEQ ID NO: 150 - protein, 7 aa, synthetic construct
  source 1..7: note = LCDR2-025
DAQSLES

SEQ ID NO: 151 - protein, 7 aa, synthetic construct
  source 1..7: note = LCDR2-026
DATSLES

SEQ ID NO: 152 - protein, 7 aa, synthetic construct
  source 1..7: note = LCDR2-027
DAYSLES

SEQ ID NO: 153 - protein, 7 aa, synthetic construct
  source 1..7: note = LCDR2-028
DASILES

SEQ ID NO: 154 - protein, 7 aa, synthetic construct
  source 1..7: note = LCDR2-029
DASLLES

SEQ ID NO: 155 - protein, 7 aa, synthetic construct
  source 1..7: note = LCDR2-030
DASQLES

SEQ ID NO: 156 - protein, 7 aa, synthetic construct
  source 1..7: note = LCDR2-031
DASTLES

SEQ ID NO: 157 - protein, 7 aa, synthetic construct
  source 1..7: note = LCDR2-032
DASVLES

SEQ ID NO: 158 - protein, 7 aa, synthetic construct
  source 1..7: note = LCDR2-033
FASELES

SEQ ID NO: 159 - protein, 8 aa, synthetic construct
  source 1..8: note = LCDR3-002
QFFNDYFT

SEQ ID NO: 160 - protein, 8 aa, synthetic construct
  source 1..8: note = LCDR3-003
QYFNDYFT

SEQ ID NO: 161 - protein, 8 aa, synthetic construct
  source 1..8: note = LCDR3-004
QQYNDYFT

SEQ ID NO: 162 - protein, 8 aa, synthetic construct
  source 1..8: note = LCDR3-005
QQFDDYFT

SEQ ID NO: 163 - protein, 8 aa, synthetic construct
  source 1..8: note = LCDR3-006
QQFEDYFT

SEQ ID NO: 164 - protein, 8 aa, synthetic construct
  source 1..8: note = LCDR3-007
QQFFDYFT

SEQ ID NO: 165 - protein, 8 aa, synthetic construct
  source 1..8: note = LCDR3-008
QQFSDYFT

SEQ ID NO: 166 - protein, 8 aa, synthetic construct
  source 1..8: note = LCDR3-009
QQFYDYFT

SEQ ID NO: 167 - protein, 8 aa, synthetic construct
  source 1..8: note = LCDR3-010
QQFNFYFT

SEQ ID NO: 168 - protein, 8 aa, synthetic construct
  source 1..8: note = LCDR3-011
QQFNQYFT

SEQ ID NO: 169 - protein, 8 aa, synthetic construct
  source 1..8: note = LCDR3-012
QQFNSYFT

SEQ ID NO: 170 - protein, 8 aa, synthetic construct
  source 1..8: note = LCDR3-013
QQFNTYFT

SEQ ID NO: 171 - protein, 8 aa, synthetic construct
  source 1..8: note = LCDR3-014
QQFNDDFT

SEQ ID NO: 172 - protein, 8 aa, synthetic construct
  source 1..8: note = LCDR3-015
QQFNDEFT

SEQ ID NO: 173 - protein, 8 aa, synthetic construct
  source 1..8: note = LCDR3-016
QQFNDFFT

SEQ ID NO: 174 - protein, 8 aa, synthetic construct
  source 1..8: note = LCDR3-017
QQFNDSFT

SEQ ID NO: 175 - protein, 8 aa, synthetic construct
  source 1..8: note = LCDR3-018
QQKNDYFT

SEQ ID NO: 176 - protein, 8 aa, synthetic construct
  source 1..8: note = LCDR3-019
QQRNDYFT

SEQ ID NO: 177 - protein, 8 aa, synthetic construct
  source 1..8: note = LCDR3-020
QQFQDYFT

SEQ ID NO: 178 - protein, 8 aa, synthetic construct
  source 1..8: note = LCDR3-021
QQFTDYFT

SEQ ID NO: 179 - protein, 8 aa, synthetic construct
  source 1..8: note = LCDR3-022
QQFNEYFT

SEQ ID NO: 180 - protein, 8 aa, synthetic construct
  source 1..8: note = LCDR3-023
QQFNRYFT

SEQ ID NO: 181 - protein, 8 aa, synthetic construct
  source 1..8: note = LCDR3-024
QQFNYYFT

SEQ ID NO: 182 - protein, 8 aa, synthetic construct
  source 1..8: note = LCDR3-025
QQFNDQFT

SEQ ID NO: 183 - protein, 8 aa, synthetic construct
  source 1..8: note = LCDR3-026
QQFNDTFT

SEQ ID NO: 184 - protein, 8 aa, synthetic construct
  source 1..8: note = LCDR3-027
QQFDFYFT

SEQ ID NO: 185 - protein, 8 aa, synthetic construct
  source 1..8: note = LCDR3-028
QQFEFYFT

SEQ ID NO: 186 - protein, 117 aa, synthetic construct
  source 1..117: note = VH-002
QVQLVQSGAEVKKPGASVKVSCKASGYTFTNHYMHWVRQAPGQGLEWMGIINPISGSTSNAQKFQGRVTMTRDTSTSTVYMELSSLRSEDTAVYYCAREIVDAFDFWGQGTMVTVSS

SEQ ID NO: 187 - protein, 117 aa, synthetic construct
  source 1..117: note = VH-003
QVQLVQSGAEVKKPGASVKVSCKASGYTFTNHYMHWVRQAPGQGLEWMGIINPISGSTSNAQKFQGRVTMTRDTSTSTVYMELSSLRSEDTAVYYCARQIVDAFDFWGQGTMVTVSS

SEQ ID NO: 188 - protein, 117 aa, synthetic construct
  source 1..117: note = VH-004
QVQLVQSGAEVKKPGASVKVSCKASGYTFTNHYMHWVRQAPGQGLEWMGIINPISGSTSNAQKFQGRVTMTRDTSTSTVYMELSSLRSEDTAVYYCARYIVDAFDFWGQGTMVTVSS

SEQ ID NO: 189 - protein, 117 aa, synthetic construct
  source 1..117: note = VH-005
QVQLVQSGAEVKKPGASVKVSCKASGYTFTNHYMHWVRQAPGQGLEWMGIINPISGSTSNAQKFQGRVTMTRDTSTSTVYMELSSLRSEDTAVYYCARDLVDAFDFWGQGTMVTVSS

SEQ ID NO: 190 - protein, 117 aa, synthetic construct
  source 1..117: note = VH-006
QVQLVQSGAEVKKPGASVKVSCKASGYTFTNHYMHWVRQAPGQGLEWMGIINPISGSTSNAQKFQGRVTMTRDTSTSTVYMELSSLRSEDTAVYYCARDQVDAFDFWGQGTMVTVSS

SEQ ID NO: 191 - protein, 117 aa, synthetic construct
  source 1..117: note = VH-007
QVQLVQSGAEVKKPGASVKVSCKASGYTFTNHYMHWVRQAPGQGLEWMGIINPISGSTSNAQKFQGRVTMTRDTSTSTVYMELSSLRSEDTAVYYCARDVVDAFDFWGQGTMVTVSS

SEQ ID NO: 192 - protein, 117 aa, synthetic construct
  source 1..117: note = VH-008
QVQLVQSGAEVKKPGASVKVSCKASGYTFTNHYMHWVRQAPGQGLEWMGIINPISGSTSNAQKFQGRVTMTRDTSTSTVYMELSSLRSEDTAVYYCARDYVDAFDFWGQGTMVTVSS

SEQ ID NO: 193 - protein, 117 aa, synthetic construct
  source 1..117: note = VH-009
QVQLVQSGAEVKKPGASVKVSCKASGYTFTNHYMHWVRQAPGQGLEWMGIINPISGSTSNAQKFQGRVTMTRDTSTSTVYMELSSLRSEDTAVYYCARDITDAFDFWGQGTMVTVSS

SEQ ID NO: 194 - protein, 117 aa, synthetic construct
  source 1..117: note = VH-010
QVQLVQSGAEVKKPGASVKVSCKASGYTFTNHYMHWVRQAPGQGLEWMGIINPISGSTSNAQKFQGRVTMTRDTSTSTVYMELSSLRSEDTAVYYCARDIYDAFDFWGQGTMVTVSS

SEQ ID NO: 195 - protein, 117 aa, synthetic construct
  source 1..117: note = VH-011
QVQLVQSGAEVKKPGASVKVSCKASGYTFTNHYMHWVRQAPGQGLEWMGIINPISGSTSNAQKFQGRVTMTRDTSTSTVYMELSSLRSEDTAVYYCARDIVEAFDFWGQGTMVTVSS

SEQ ID NO: 196 - protein, 117 aa, synthetic construct
  source 1..117: note = VH-012
QVQLVQSGAEVKKPGASVKVSCKASGYTFTNHYMHWVRQAPGQGLEWMGIINPISGSTSNAQKFQGRVTMTRDTSTSTVYMELSSLRSEDTAVYYCARDIVFAFDFWGQGTMVTVSS

SEQ ID NO: 197 - protein, 117 aa, synthetic construct
  source 1..117: note = VH-013
QVQLVQSGAEVKKPGASVKVSCKASGYTFTNHYMHWVRQAPGQGLEWMGIINPISGSTSNAQKFQGRVTMTRDTSTSTVYMELSSLRSEDTAVYYCARDIVIAFDFWGQGTMVTVSS

SEQ ID NO: 198 - protein, 117 aa, synthetic construct
  source 1..117: note = VH-014
QVQLVQSGAEVKKPGASVKVSCKASGYTFTNHYMHWVRQAPGQGLEWMGIINPISGSTSNAQKFQGRVTMTRDTSTSTVYMELSSLRSEDTAVYYCARDIVLAFDFWGQGTMVTVSS

SEQ ID NO: 199 - protein, 117 aa, synthetic construct
  source 1..117: note = VH-015
QVQLVQSGAEVKKPGASVKVSCKASGYTFTNHYMHWVRQAPGQGLEWMGIINPISGSTSNAQKFQGRVTMTRDTSTSTVYMELSSLRSEDTAVYYCARDIVQAFDFWGQGTMVTVSS

SEQ ID NO: 200 - protein, 117 aa, synthetic construct
  source 1..117: note = VH-016
QVQLVQSGAEVKKPGASVKVSCKASGYTFTNHYMHWVRQAPGQGLEWMGIINPISGSTSNAQKFQGRVTMTRDTSTSTVYMELSSLRSEDTAVYYCARDIVYAFDFWGQGTMVTVSS

SEQ ID NO: 201 - protein, 117 aa, synthetic construct
  source 1..117: note = VH-017
QVQLVQSGAEVKKPGASVKVSCKASGYTFTNHYMHWVRQAPGQGLEWMGIINPISGSTSNAQKFQGRVTMTRDTSTSTVYMELSSLRSEDTAVYYCARDIVDEFDFWGQGTMVTVSS

SEQ ID NO: 202 - protein, 117 aa, synthetic construct
  source 1..117: note = VH-018
QVQLVQSGAEVKKPGASVKVSCKASGYTFTNHYMHWVRQAPGQGLEWMGIINPISGSTSNAQKFQGRVTMTRDTSTSTVYMELSSLRSEDTAVYYCARDIVDQFDFWGQGTMVTVSS

SEQ ID NO: 203 - protein, 117 aa, synthetic construct
  source 1..117: note = VH-019
QVQLVQSGAEVKKPGASVKVSCKASGYTFTNHYMHWVRQAPGQGLEWMGIINPISGSTSNAQKFQGRVTMTRDTSTSTVYMELSSLRSEDTAVYYCARDIVDYFDFWGQGTMVTVSS

SEQ ID NO: 204 - protein, 117 aa, synthetic construct
  source 1..117: note = VH-020
QVQLVQSGAEVKKPGASVKVSCKASGYTFFNHYMHWVRQAPGQGLEWMGIINPISGSTSNAQKFQGRVTMTRDTSTSTVYMELSSLRSEDTAVYYCARDIVDAFDFWGQGTMVTVSS

SEQ ID NO: 205 - protein, 117 aa, synthetic construct
  source 1..117: note = VH-021
QVQLVQSGAEVKKPGASVKVSCKASGYTFTDHYMHWVRQAPGQGLEWMGIINPISGSTSNAQKFQGRVTMTRDTSTSTVYMELSSLRSEDTAVYYCARDIVDAFDFWGQGTMVTVSS

SEQ ID NO: 206 - protein, 117 aa, synthetic construct
  source 1..117: note = VH-022
QVQLVQSGAEVKKPGASVKVSCKASGYTFTEHYMHWVRQAPGQGLEWMGIINPISGSTSNAQKFQGRVTMTRDTSTSTVYMELSSLRSEDTAVYYCARDIVDAFDFWGQGTMVTVSS

SEQ ID NO: 207 - protein, 117 aa, synthetic construct
  source 1..117: note = VH-023
QVQLVQSGAEVKKPGASVKVSCKASGYTFTFHYMHWVRQAPGQGLEWMGIINPISGSTSNAQKFQGRVTMTRDTSTSTVYMELSSLRSEDTAVYYCARDIVDAFDFWGQGTMVTVSS

SEQ ID NO: 208 - protein, 117 aa, synthetic construct
  source 1..117: note = VH-024
QVQLVQSGAEVKKPGASVKVSCKASGYTFTQHYMHWVRQAPGQGLEWMGIINPISGSTSNAQKFQGRVTMTRDTSTSTVYMELSSLRSEDTAVYYCARDIVDAFDFWGQGTMVTVSS

SEQ ID NO: 209 - protein, 117 aa, synthetic construct
  source 1..117: note = VH-025
QVQLVQSGAEVKKPGASVKVSCKASGYTFTRHYMHWVRQAPGQGLEWMGIINPISGSTSNAQKFQGRVTMTRDTSTSTVYMELSSLRSEDTAVYYCARDIVDAFDFWGQGTMVTVSS

SEQ ID NO: 210 - protein, 117 aa, synthetic construct
  source 1..117: note = VH-026
QVQLVQSGAEVKKPGASVKVSCKASGYTFTNHYMHWVRQAPGQGLEWMGIIFPISGSTSNAQKFQGRVTMTRDTSTSTVYMELSSLRSEDTAVYYCARDIVDAFDFWGQGTMVTVSS

SEQ ID NO: 211 - protein, 117 aa, synthetic construct
  source 1..117: note = VH-027
QVQLVQSGAEVKKPGASVKVSCKASGYTFTNHYMHWVRQAPGQGLEWMGIIYPISGSTSNAQKFQGRVTMTRDTSTSTVYMELSSLRSEDTAVYYCARDIVDAFDFWGQGTMVTVSS

SEQ ID NO: 212 - protein, 117 aa, synthetic construct
  source 1..117: note = VH-028
QVQLVQSGAEVKKPGASVKVSCKASGYTFTNHYMHWVRQAPGQGLEWMGIINPFSGSTSNAQKFQGRVTMTRDTSTSTVYMELSSLRSEDTAVYYCARDIVDAFDFWGQGTMVTVSS

SEQ ID NO: 213 - protein, 117 aa, synthetic construct
  source 1..117: note = VH-029
QVQLVQSGAEVKKPGASVKVSCKASGYTFTNHYMHWVRQAPGQGLEWMGIINPYSGSTSNAQKFQGRVTMTRDTSTSTVYMELSSLRSEDTAVYYCARDIVDAFDFWGQGTMVTVSS

SEQ ID NO: 214 - protein, 117 aa, synthetic construct
  source 1..117: note = VH-030
QVQLVQSGAEVKKPGASVKVSCKASGYTFTNHYMHWVRQAPGQGLEWMGIINPISGSTDNAQKFQGRVTMTRDTSTSTVYMELSSLRSEDTAVYYCARDIVDAFDFWGQGTMVTVSS

SEQ ID NO: 215 - protein, 117 aa, synthetic construct
  source 1..117: note = VH-031
QVQLVQSGAEVKKPGASVKVSCKASGYTFTNHYMHWVRQAPGQGLEWMGIINPISGSTENAQKFQGRVTMTRDTSTSTVYMELSSLRSEDTAVYYCARDIVDAFDFWGQGTMVTVSS

SEQ ID NO: 216 - protein, 117 aa, synthetic construct
  source 1..117: note = VH-032
QVQLVQSGAEVKKPGASVKVSCKASGYTFTNHYMHWVRQAPGQGLEWMGIINPISGSTFNAQKFQGRVTMTRDTSTSTVYMELSSLRSEDTAVYYCARDIVDAFDFWGQGTMVTVSS

SEQ ID NO: 217 - protein, 117 aa, synthetic construct
  source 1..117: note = VH-033
QVQLVQSGAEVKKPGASVKVSCKASGYTFENHYMHWVRQAPGQGLEWMGIINPISGSTSNAQKFQGRVTMTRDTSTSTVYMELSSLRSEDTAVYYCARDIVDAFDFWGQGTMVTVSS

SEQ ID NO: 218 - protein, 117 aa, synthetic construct
  source 1..117: note = VH-034
QVQLVQSGAEVKKPGASVKVSCKASGYTFTNHYMHWVRQAPGQGLEWMGIINPISGSTINAQKFQGRVTMTRDTSTSTVYMELSSLRSEDTAVYYCARDIVDAFDFWGQGTMVTVSS

SEQ ID NO: 219 - protein, 117 aa, synthetic construct
  source 1..117: note = VH-035
QVQLVQSGAEVKKPGASVKVSCKASGYTFQNHYMHWVRQAPGQGLEWMGIINPISGSTSNAQKFQGRVTMTRDTSTSTVYMELSSLRSEDTAVYYCARDIVDAFDFWGQGTMVTVSS

SEQ ID NO: 220 - protein, 117 aa, synthetic construct
  source 1..117: note = VH-036
QVQLVQSGAEVKKPGASVKVSCKASGYTFTNHYMHWVRQAPGQGLEWMGIINPISGSTLNAQKFQGRVTMTRDTSTSTVYMELSSLRSEDTAVYYCARDIVDAFDFWGQGTMVTVSS

SEQ ID NO: 221 - protein, 117 aa, synthetic construct
  source 1..117: note = VH-037
QVQLVQSGAEVKKPGASVKVSCKASGYTFSNHYMHWVRQAPGQGLEWMGIINPISGSTSNAQKFQGRVTMTRDTSTSTVYMELSSLRSEDTAVYYCARDIVDAFDFWGQGTMVTVSS

SEQ ID NO: 222 - protein, 117 aa, synthetic construct
  source 1..117: note = VH-038
QVQLVQSGAEVKKPGASVKVSCKASGYTFTNHYMHWVRQAPGQGLEWMGIINPISGSTQNAQKFQGRVTMTRDTSTSTVYMELSSLRSEDTAVYYCARDIVDAFDFWGQGTMVTVSS

SEQ ID NO: 223 - protein, 117 aa, synthetic construct
  source 1..117: note = VH-039
QVQLVQSGAEVKKPGASVKVSCKASGYTFTNHYMHWVRQAPGQGLEWMGIINPISGSTTNAQKFQGRVTMTRDTSTSTVYMELSSLRSEDTAVYYCARDIVDAFDFWGQGTMVTVSS

SEQ ID NO: 224 - protein, 117 aa, synthetic construct
  source 1..117: note = VH-040
QVQLVQSGAEVKKPGASVKVSCKASGYTFYNHYMHWVRQAPGQGLEWMGIINPISGSTSNAQKFQGRVTMTRDTSTSTVYMELSSLRSEDTAVYYCARDIVDAFDFWGQGTMVTVSS

SEQ ID NO: 225 - protein, 117 aa, synthetic construct
  source 1..117: note = VH-041
QVQLVQSGAEVKKPGASVKVSCKASGYTFTNHYMHWVRQAPGQGLEWMGIINPISGSTVNAQKFQGRVTMTRDTSTSTVYMELSSLRSEDTAVYYCARDIVDAFDFWGQGTMVTVSS

SEQ ID NO: 226 - protein, 117 aa, synthetic construct
  source 1..117: note = VH-042
QVQLVQSGAEVKKPGASVKVSCKASGYTFTYHYMHWVRQAPGQGLEWMGIINPISGSTSNAQKFQGRVTMTRDTSTSTVYMELSSLRSEDTAVYYCARDIVDAFDFWGQGTMVTVSS

SEQ ID NO: 227 - protein, 117 aa, synthetic construct
  source 1..117: note = VH-043
QVQLVQSGAEVKKPGASVKVSCKASGYTFTNHEMHWVRQAPGQGLEWMGIINPISGSTSNAQKFQGRVTMTRDTSTSTVYMELSSLRSEDTAVYYCARDIVDAFDFWGQGTMVTVSS

SEQ ID NO: 228 - protein, 117 aa, synthetic construct
  source 1..117: note = VH-044
QVQLVQSGAEVKKPGASVKVSCKASGYTFTNHYMHWVRQAPGQGLEWMGIINPISGSTYNAQKFQGRVTMTRDTSTSTVYMELSSLRSEDTAVYYCARDIVDAFDFWGQGTMVTVSS

SEQ ID NO: 229 - protein, 117 aa, synthetic construct
  source 1..117: note = VH-045
QVQLVQSGAEVKKPGASVKVSCKASGYTFTNHFMHWVRQAPGQGLEWMGIINPISGSTSNAQKFQGRVTMTRDTSTSTVYMELSSLRSEDTAVYYCARDIVDAFDFWGQGTMVTVSS

SEQ ID NO: 230 - protein, 117 aa, synthetic construct
  source 1..117: note = VH-046
QVQLVQSGAEVKKPGASVKVSCKASGYTFTNHYMHWVRQAPGQGLEWMGIINPISGSTSNAQKFQGRVTMTRDTSTSTVYMELSSLRSEDTAVYYCARDDVDAFDFWGQGTMVTVSS

SEQ ID NO: 231 - protein, 117 aa, synthetic construct
  source 1..117: note = VH-047
QVQLVQSGAEVKKPGASVKVSCKASGYTFTNHQMHWVRQAPGQGLEWMGIINPISGSTSNAQKFQGRVTMTRDTSTSTVYMELSSLRSEDTAVYYCARDIVDAFDFWGQGTMVTVSS

SEQ ID NO: 232 - protein, 117 aa, synthetic construct
  source 1..117: note = VH-048
QVQLVQSGAEVKKPGASVKVSCKASGYTFTNHYMHWVRQAPGQGLEWMGIINPISGSTSNAQKFQGRVTMTRDTSTSTVYMELSSLRSEDTAVYYCARDEVDAFDFWGQGTMVTVSS

SEQ ID NO: 233 - protein, 117 aa, synthetic construct
  source 1..117: note = VH-049
QVQLVQSGAEVKKPGASVKVSCKASGYTFTNHSMHWVRQAPGQGLEWMGIINPISGSTSNAQKFQGRVTMTRDTSTSTVYMELSSLRSEDTAVYYCARDIVDAFDFWGQGTMVTVSS

SEQ ID NO: 234 - protein, 117 aa, synthetic construct
  source 1..117: note = VH-050
QVQLVQSGAEVKKPGASVKVSCKASGYTFTNHYMHWVRQAPGQGLEWMGIINPISGSTSNAQKFQGRVTMTRDTSTSTVYMELSSLRSEDTAVYYCARDFVDAFDFWGQGTMVTVSS

SEQ ID NO: 235 - protein, 117 aa, synthetic construct
  source 1..117: note = VH-051
QVQLVQSGAEVKKPGASVKVSCKASGYTFTNHTMHWVRQAPGQGLEWMGIINPISGSTSNAQKFQGRVTMTRDTSTSTVYMELSSLRSEDTAVYYCARDIVDAFDFWGQGTMVTVSS

SEQ ID NO: 236 - protein, 117 aa, synthetic construct
  source 1..117: note = VH-052
QVQLVQSGAEVKKPGASVKVSCKASGYTFTNHYMHWVRQAPGQGLEWMGIINPISGSTSNAQKFQGRVTMTRDTSTSTVYMELSSLRSEDTAVYYCARDIFDAFDFWGQGTMVTVSS

SEQ ID NO: 237 - protein, 117 aa, synthetic construct
  source 1..117: note = VH-053
QVQLVQSGAEVKKPGASVKVSCKASGYTFTNHYMHWVRQAPGQGLEWMGDINPISGSTSNAQKFQGRVTMTRDTSTSTVYMELSSLRSEDTAVYYCARDIVDAFDFWGQGTMVTVSS

SEQ ID NO: 238 - protein, 117 aa, synthetic construct
  source 1..117: note = VH-054
QVQLVQSGAEVKKPGASVKVSCKASGYTFTNHYMHWVRQAPGQGLEWMGIINPISGSTSNAQKFQGRVTMTRDTSTSTVYMELSSLRSEDTAVYYCARDIIDAFDFWGQGTMVTVSS

SEQ ID NO: 239 - protein, 117 aa, synthetic construct
  source 1..117: note = VH-055
QVQLVQSGAEVKKPGASVKVSCKASGYTFTNHYMHWVRQAPGQGLEWMGEINPISGSTSNAQKFQGRVTMTRDTSTSTVYMELSSLRSEDTAVYYCARDIVDAFDFWGQGTMVTVSS

SEQ ID NO: 240 - protein, 117 aa, synthetic construct
  source 1..117: note = VH-056
QVQLVQSGAEVKKPGASVKVSCKASGYTFTNHYMHWVRQAPGQGLEWMGIINPISGSTSNAQKFQGRVTMTRDTSTSTVYMELSSLRSEDTAVYYCARDILDAFDFWGQGTMVTVSS

SEQ ID NO: 241 - protein, 117 aa, synthetic construct
  source 1..117: note = VH-057
QVQLVQSGAEVKKPGASVKVSCKASGYTFTNHYMHWVRQAPGQGLEWMGFINPISGSTSNAQKFQGRVTMTRDTSTSTVYMELSSLRSEDTAVYYCARDIVDAFDFWGQGTMVTVSS

SEQ ID NO: 242 - protein, 117 aa, synthetic construct
  source 1..117: note = VH-058
QVQLVQSGAEVKKPGASVKVSCKASGYTFTNHYMHWVRQAPGQGLEWMGIINPISGSTSNAQKFQGRVTMTRDTSTSTVYMELSSLRSEDTAVYYCARDIVDDFDFWGQGTMVTVSS

SEQ ID NO: 243 - protein, 117 aa, synthetic construct
  source 1..117: note = VH-059
QVQLVQSGAEVKKPGASVKVSCKASGYTFTNHYMHWVRQAPGQGLEWMGIINPISGSTSNAQKFQGRVTMTRDTSTSTVYMELSSLRSEDTAVYYCARDIVDFFDFWGQGTMVTVSS

SEQ ID NO: 244 - protein, 117 aa, synthetic construct
  source 1..117: note = VH-060
QVQLVQSGAEVKKPGASVKVSCKASGYTFTNHYMHWVRQAPGQGLEWMGSINPISGSTSNAQKFQGRVTMTRDTSTSTVYMELSSLRSEDTAVYYCARDIVDAFDFWGQGTMVTVSS

SEQ ID NO: 245 - protein, 117 aa, synthetic construct
  source 1..117: note = VH-061
QVQLVQSGAEVKKPGASVKVSCKASGYTFTNHYMHWVRQAPGQGLEWMGIINPISGSTSNAQKFQGRVTMTRDTSTSTVYMELSSLRSEDTAVYYCARDIVDSFDFWGQGTMVTVSS

SEQ ID NO: 246 - protein, 117 aa, synthetic construct
  source 1..117: note = VH-062
QVQLVQSGAEVKKPGASVKVSCKASGYTFTNHYMHWVRQAPGQGLEWMGTINPISGSTSNAQKFQGRVTMTRDTSTSTVYMELSSLRSEDTAVYYCARDIVDAFDFWGQGTMVTVSS

SEQ ID NO: 247 - protein, 117 aa, synthetic construct
  source 1..117: note = VH-063
QVQLVQSGAEVKKPGASVKVSCKASGYTFTNHYMHWVRQAPGQGLEWMGIINPISGSTSNAQKFQGRVTMTRDTSTSTVYMELSSLRSEDTAVYYCARDIVDTFDFWGQGTMVTVSS

SEQ ID NO: 248 - protein, 117 aa, synthetic construct
  source 1..117: note = VH-064
QVQLVQSGAEVKKPGASVKVSCKASGYTFTNHYMHWVRQAPGQGLEWMGYINPISGSTSNAQKFQGRVTMTRDTSTSTVYMELSSLRSEDTAVYYCARDIVDAFDFWGQGTMVTVSS

SEQ ID NO: 249 - protein, 117 aa, synthetic construct
  source 1..117: note = VH-065
QVQLVQSGAEVKKPGASVKVSCKASGYTFTNHYMHWVRQAPGQGLEWMGIIEPISGSTSNAQKFQGRVTMTRDTSTSTVYMELSSLRSEDTAVYYCARDIVDAFDFWGQGTMVTVSS

SEQ ID NO: 250 - protein, 117 aa, synthetic construct
  source 1..117: note = VH-066
QVQLVQSGAEVKKPGASVKVSCKASGYTFTNHYMHWVRQAPGQGLEWMGIIQPISGSTSNAQKFQGRVTMTRDTSTSTVYMELSSLRSEDTAVYYCARDIVDAFDFWGQGTMVTVSS

SEQ ID NO: 251 - protein, 117 aa, synthetic construct
  source 1..117: note = VH-067
QVQLVQSGAEVKKPGASVKVSCKASGYTFTNHYMHWVRQAPGQGLEWMGIINPESGSTSNAQKFQGRVTMTRDTSTSTVYMELSSLRSEDTAVYYCARDIVDAFDFWGQGTMVTVSS

SEQ ID NO: 252 - protein, 117 aa, synthetic construct
  source 1..117: note = VH-068
QVQLVQSGAEVKKPGASVKVSCKASGYTFTNHYMHWVRQAPGQGLEWMGIINPLSGSTSNAQKFQGRVTMTRDTSTSTVYMELSSLRSEDTAVYYCARDIVDAFDFWGQGTMVTVSS

SEQ ID NO: 253 - protein, 117 aa, synthetic construct
  source 1..117: note = VH-069
QVQLVQSGAEVKKPGASVKVSCKASGYTFTNHYMHWVRQAPGQGLEWMGIINPQSGSTSNAQKFQGRVTMTRDTSTSTVYMELSSLRSEDTAVYYCARDIVDAFDFWGQGTMVTVSS

SEQ ID NO: 254 - protein, 117 aa, synthetic construct
  source 1..117: note = VH-070
QVQLVQSGAEVKKPGASVKVSCKASGYTFTNHYMHWVRQAPGQGLEWMGIINPSSGSTSNAQKFQGRVTMTRDTSTSTVYMELSSLRSEDTAVYYCARDIVDAFDFWGQGTMVTVSS

SEQ ID NO: 255 - protein, 117 aa, synthetic construct
  source 1..117: note = VH-071
QVQLVQSGAEVKKPGASVKVSCKASGYTFTNHYMHWVRQAPGQGLEWMGIINPTSGSTSNAQKFQGRVTMTRDTSTSTVYMELSSLRSEDTAVYYCARDIVDAFDFWGQGTMVTVSS

SEQ ID NO: 256 - protein, 117 aa, synthetic construct
  source 1..117: note = VH-072
QVQLVQSGAEVKKPGASVKVSCKASGYTFTNHYMHWVRQAPGQGLEWMGIINPVSGSTSNAQKFQGRVTMTRDTSTSTVYMELSSLRSEDTAVYYCARDIVDAFDFWGQGTMVTVSS

SEQ ID NO: 257 - protein, 117 aa, synthetic construct
  source 1..117: note = VH-073
QVQLVQSGAEVKKPGASVKVSCKASGYTFTNHYMHWVRQAPGQGLEWMGIINPIEGSTSNAQKFQGRVTMTRDTSTSTVYMELSSLRSEDTAVYYCARDIVDAFDFWGQGTMVTVSS

SEQ ID NO: 258 - protein, 117 aa, synthetic construct
  source 1..117: note = VH-074
QVQLVQSGAEVKKPGASVKVSCKASGYTFTNHYMHWVRQAPGQGLEWMGIINPIFGSTSNAQKFQGRVTMTRDTSTSTVYMELSSLRSEDTAVYYCARDIVDAFDFWGQGTMVTVSS

SEQ ID NO: 259 - protein, 117 aa, synthetic construct
  source 1..117: note = VH-075
QVQLVQSGAEVKKPGASVKVSCKASGYTFTNHYMHWVRQAPGQGLEWMGIINPIQGSTSNAQKFQGRVTMTRDTSTSTVYMELSSLRSEDTAVYYCARDIVDAFDFWGQGTMVTVSS

SEQ ID NO: 260 - protein, 117 aa, synthetic construct
  source 1..117: note = VH-076
QVQLVQSGAEVKKPGASVKVSCKASGYTFTNHYMHWVRQAPGQGLEWMGIINPISGETDNAQKFQGRVTMTRDTSTSTVYMELSSLRSEDTAVYYCARDIVDAFDFWGQGTMVTVSS

SEQ ID NO: 261 - protein, 117 aa, synthetic construct
  source 1..117: note = VH-077
QVQLVQSGAEVKKPGASVKVSCKASGYTFTNHYMHWVRQAPGQGLEWMGIINPITGSTSNAQKFQGRVTMTRDTSTSTVYMELSSLRSEDTAVYYCARDIVDAFDFWGQGTMVTVSS

SEQ ID NO: 262 - protein, 117 aa, synthetic construct
  source 1..117: note = VH-078
QVQLVQSGAEVKKPGASVKVSCKASGYTFTNHYMHWVRQAPGQGLEWMGIINPYSGSTSNAQKFQGRVTMTRDTSTSTVYMELSSLRSEDTAVYYCARDIFDAFDFWGQGTMVTVSS

SEQ ID NO: 263 - protein, 117 aa, synthetic construct
  source 1..117: note = VH-079
QVQLVQSGAEVKKPGASVKVSCKASGYTFTFHYMHWVRQAPGQGLEWMGIINPISGSTFNAQKFQGRVTMTRDTSTSTVYMELSSLRSEDTAVYYCARDIVDAFDFWGQGTMVTVSS

SEQ ID NO: 264 - protein, 117 aa, synthetic construct
  source 1..117: note = VH-080
QVQLVQSGAEVKKPGASVKVSCKASGYTFTNHYMHWVRQAPGQGLEWMGIINPIYGSTSNAQKFQGRVTMTRDTSTSTVYMELSSLRSEDTAVYYCARDIVDAFDFWGQGTMVTVSS

SEQ ID NO: 265 - protein, 117 aa, synthetic construct
  source 1..117: note = VH-081
QVQLVQSGAEVKKPGASVKVSCKASGYTFTEHYMHWVRQAPGQGLEWMGIINPISGSTENAQKFQGRVTMTRDTSTSTVYMELSSLRSEDTAVYYCARDIVDAFDFWGQGTMVTVSS

SEQ ID NO: 266 - protein, 117 aa, synthetic construct
  source 1..117: note = VH-082
QVQLVQSGAEVKKPGASVKVSCKASGYTFTEHYMHWVRQAPGQGLEWMGIINPFSGSTSNAQKFQGRVTMTRDTSTSTVYMELSSLRSEDTAVYYCARDIVDAFDFWGQGTMVTVSS

SEQ ID NO: 267 - protein, 117 aa, synthetic construct
  source 1..117: note = VH-083
QVQLVQSGAEVKKPGASVKVSCKASGYTFTNHYMHWVRQAPGQGLEWMGIIFPISGSTSNAQKFQGRVTMTRDTSTSTVYMELSSLRSEDTAVYYCARDIIDAFDFWGQGTMVTVSS

SEQ ID NO: 268 - protein, 117 aa, synthetic construct
  source 1..117: note = VH-084
QVQLVQSGAEVKKPGASVKVSCKASGYTFTNHYMHWVRQAPGQGLEWMGIIFPISGSTSNAQKFQGRVTMTRDTSTSTVYMELSSLRSEDTAVYYCARDILDAFDFWGQGTMVTVSS

SEQ ID NO: 269 - protein, 117 aa, synthetic construct
  source 1..117: note = VH-085
QVQLVQSGAEVKKPGASVKVSCKASGYTFTNHYMHWVRQAPGQGLEWMGIINPISGSTDNAQKFQGRVTMTRDTSTSTVYMELSSLRSEDTAVYYCARDIIDAFDFWGQGTMVTVSS

SEQ ID NO: 270 - protein, 117 aa, synthetic construct
  source 1..117: note = VH-086
QVQLVQSGAEVKKPGASVKVSCKASGYTFTNHYMHWVRQAPGQGLEWMGIINPISGSTTNAQKFQGRVTMTRDTSTSTVYMELSSLRSEDTAVYYCARDILDAFDFWGQGTMVTVSS

SEQ ID NO: 271 - protein, 107 aa, synthetic construct
  source 1..107: note = VL-002
AIQLTQSPSSLSASVGDRVTITCRASQGFSSALVWYQQKPGKAPKLLIYDASSLESGVPSRFSGSGSGTDFTLTISSLQPEDFATYYCQQFNDYFTFGPGTKVDIKR

SEQ ID NO: 272 - protein, 107 aa, synthetic construct
  source 1..107: note = VL-014
AIQLTQSPSSLSASVGDRVTITCRASQGLSSALVWYQQKPGKAPKLLIYDASSLESGVPSRFSGSGSGTDFTLTISSLQPEDFATYYCQQFNDYFTFGPGTKVDIKR

SEQ ID NO: 273 - protein, 107 aa, synthetic construct
  source 1..107: note = VL-035
AIQLTQSPSSLSASVGDRVTITCRASQGIDSALVWYQQKPGKAPKLLIYDASSLESGVPSRFSGSGSGTDFTLTISSLQPEDFATYYCQQFNDYFTFGPGTKVDIKR

SEQ ID NO: 274 - protein, 107 aa, synthetic construct
  source 1..107: note = VL-056
AIQLTQSPSSLSASVGDRVTITCRASQGIESALVWYQQKPGKAPKLLIYDASSLESGVPSRFSGSGSGTDFTLTISSLQPEDFATYYCQQFNDYFTFGPGTKVDIKR

SEQ ID NO: 275 - protein, 107 aa, synthetic construct
  source 1..107: note = VL-075
AIQLTQSPSSLSASVGDRVTITCRASQGIFSALVWYQQKPGKAPKLLIYDASSLESGVPSRFSGSGSGTDFTLTISSLQPEDFATYYCQQFNDYFTFGPGTKVDIKR

SEQ ID NO: 276 - protein, 107 aa, synthetic construct
  source 1..107: note = VL-086
AIQLTQSPSSLSASVGDRVTITCRASQGILSALVWYQQKPGKAPKLLIYDASSLESGVPSRFSGSGSGTDFTLTISSLQPEDFATYYCQQFNDYFTFGPGTKVDIKR

SEQ ID NO: 277 - protein, 107 aa, synthetic construct
  source 1..107: note = VL-088
AIQLTQSPSSLSASVGDRVTITCRASQGIQSALVWYQQKPGKAPKLLIYDASSLESGVPSRFSGSGSGTDFTLTISSLQPEDFATYYCQQFNDYFTFGPGTKVDIKR

SEQ ID NO: 278 - protein, 107 aa, synthetic construct
  source 1..107: note = VL-091
AIQLTQSPSSLSASVGDRVTITCRASQGIYSALVWYQQKPGKAPKLLIYDASSLESGVPSRFSGSGSGTDFTLTISSLQPEDFATYYCQQFNDYFTFGPGTKVDIKR

SEQ ID NO: 279 - protein, 107 aa, synthetic construct
  source 1..107: note = VL-099
AIQLTQSPSSLSASVGDRVTITCRASQGISDALVWYQQKPGKAPKLLIYDASSLESGVPSRFSGSGSGTDFTLTISSLQPEDFATYYCQQFNDYFTFGPGTKVDIKR

SEQ ID NO: 280 - protein, 107 aa, synthetic construct
  source 1..107: note = VL-003
AIQLTQSPSSLSASVGDRVTITCRASQGISEALVWYQQKPGKAPKLLIYDASSLESGVPSRFSGSGSGTDFTLTISSLQPEDFATYYCQQFNDYFTFGPGTKVDIKR

SEQ ID NO: 281 - protein, 107 aa, synthetic construct
  source 1..107: note = VL-004
AIQLTQSPSSLSASVGDRVTITCRASQGISFALVWYQQKPGKAPKLLIYDASSLESGVPSRFSGSGSGTDFTLTISSLQPEDFATYYCQQFNDYFTFGPGTKVDIKR

SEQ ID NO: 282 - protein, 107 aa, synthetic construct
  source 1..107: note = VL-005
AIQLTQSPSSLSASVGDRVTITCRASQGISQALVWYQQKPGKAPKLLIYDASSLESGVPSRFSGSGSGTDFTLTISSLQPEDFATYYCQQFNDYFTFGPGTKVDIKR

SEQ ID NO: 283 - protein, 107 aa, synthetic construct
  source 1..107: note = VL-006
AIQLTQSPSSLSASVGDRVTITCRASQGISYALVWYQQKPGKAPKLLIYDASSLESGVPSRFSGSGSGTDFTLTISSLQPEDFATYYCQQFNDYFTFGPGTKVDIKR

SEQ ID NO: 284 - protein, 107 aa, synthetic construct
  source 1..107: note = VL-007
AIQLTQSPSSLSASVGDRVTITCRASQGISSFLVWYQQKPGKAPKLLIYDASSLESGVPSRFSGSGSGTDFTLTISSLQPEDFATYYCQQFNDYFTFGPGTKVDIKR

SEQ ID NO: 285 - protein, 107 aa, synthetic construct
  source 1..107: note = VL-008
AIQLTQSPSSLSASVGDRVTITCRASQGISSVLVWYQQKPGKAPKLLIYDASSLESGVPSRFSGSGSGTDFTLTISSLQPEDFATYYCQQFNDYFTFGPGTKVDIKR

SEQ ID NO: 286 - protein, 107 aa, synthetic construct
  source 1..107: note = VL-009
AIQLTQSPSSLSASVGDRVTITCRASQGISSALFWYQQKPGKAPKLLIYDASSLESGVPSRFSGSGSGTDFTLTISSLQPEDFATYYCQQFNDYFTFGPGTKVDIKR

SEQ ID NO: 287 - protein, 107 aa, synthetic construct
  source 1..107: note = VL-010
AIQLTQSPSSLSASVGDRVTITCRASQGISSALIWYQQKPGKAPKLLIYDASSLESGVPSRFSGSGSGTDFTLTISSLQPEDFATYYCQQFNDYFTFGPGTKVDIKR

SEQ ID NO: 288 - protein, 107 aa, synthetic construct
  source 1..107: note = VL-011
AIQLTQSPSSLSASVGDRVTITCRASQGISSALVWYQQKPGKAPKLLIYFASSLESGVPSRFSGSGSGTDFTLTISSLQPEDFATYYCQQFNDYFTFGPGTKVDIKR

SEQ ID NO: 289 - protein, 107 aa, synthetic construct
  source 1..107: note = VL-012
AIQLTQSPSSLSASVGDRVTITCRASQGISSALVWYQQKPGKAPKLLIYDASSLESGVPSRFSGSGSGTDFTLTISSLQPEDFATYYCQFFNDYFTFGPGTKVDIKR

SEQ ID NO: 290 - protein, 107 aa, synthetic construct
  source 1..107: note = VL-013
AIQLTQSPSSLSASVGDRVTITCRASQGISSALVWYQQKPGKAPKLLIYLASSLESGVPSRFSGSGSGTDFTLTISSLQPEDFATYYCQQFNDYFTFGPGTKVDIKR

SEQ ID NO: 291 - protein, 107 aa, synthetic construct
  source 1..107: note = VL-015
AIQLTQSPSSLSASVGDRVTITCRASQGISSALVWYQQKPGKAPKLLIYDASSLESGVPSRFSGSGSGTDFTLTISSLQPEDFATYYCQYFNDYFTFGPGTKVDIKR

SEQ ID NO: 292 - protein, 107 aa, synthetic construct
  source 1..107: note = VL-016
AIQLTQSPSSLSASVGDRVTITCRASQGISSALVWYQQKPGKAPKLLIYQASSLESGVPSRFSGSGSGTDFTLTISSLQPEDFATYYCQQFNDYFTFGPGTKVDIKR

SEQ ID NO: 293 - protein, 107 aa, synthetic construct
  source 1..107: note = VL-017
AIQLTQSPSSLSASVGDRVTITCRASQGISSALVWYQQKPGKAPKLLIYRASSLESGVPSRFSGSGSGTDFTLTISSLQPEDFATYYCQQFNDYFTFGPGTKVDIKR

SEQ ID NO: 294 - protein, 107 aa, synthetic construct
  source 1..107: note = VL-018
AIQLTQSPSSLSASVGDRVTITCRLSQGISSALVWYQQKPGKAPKLLIYDASSLESGVPSRFSGSGSGTDFTLTISSLQPEDFATYYCQQFNDYFTFGPGTKVDIKR

SEQ ID NO: 295 - protein, 107 aa, synthetic construct
  source 1..107: note = VL-019
AIQLTQSPSSLSASVGDRVTITCRASQGISSALVWYQQKPGKAPKLLIYSASSLESGVPSRFSGSGSGTDFTLTISSLQPEDFATYYCQQFNDYFTFGPGTKVDIKR

SEQ ID NO: 296 - protein, 107 aa, synthetic construct
  source 1..107: note = VL-020
AIQLTQSPSSLSASVGDRVTITCRVSQGISSALVWYQQKPGKAPKLLIYDASSLESGVPSRFSGSGSGTDFTLTISSLQPEDFATYYCQQFNDYFTFGPGTKVDIKR

SEQ ID NO: 297 - protein, 107 aa, synthetic construct
  source 1..107: note = VL-021
AIQLTQSPSSLSASVGDRVTITCRASQGISSALVWYQQKPGKAPKLLIYTASSLESGVPSRFSGSGSGTDFTLTISSLQPEDFATYYCQQFNDYFTFGPGTKVDIKR

SEQ ID NO: 298 - protein, 107 aa, synthetic construct
  source 1..107: note = VL-022
AIQLTQSPSSLSASVGDRVTITCRASQGVSSALVWYQQKPGKAPKLLIYDASSLESGVPSRFSGSGSGTDFTLTISSLQPEDFATYYCQQFNDYFTFGPGTKVDIKR

SEQ ID NO: 299 - protein, 107 aa, synthetic construct
  source 1..107: note = VL-023
AIQLTQSPSSLSASVGDRVTITCRASQGIISALVWYQQKPGKAPKLLIYDASSLESGVPSRFSGSGSGTDFTLTISSLQPEDFATYYCQQFNDYFTFGPGTKVDIKR

SEQ ID NO: 300 - protein, 107 aa, synthetic construct
  source 1..107: note = VL-024
AIQLTQSPSSLSASVGDRVTITCRASQGISSALVWYQQKPGKAPKLLIYVASSLESGVPSRFSGSGSGTDFTLTISSLQPEDFATYYCQQFNDYFTFGPGTKVDIKR

SEQ ID NO: 301 - protein, 107 aa, synthetic construct
  source 1..107: note = VL-025
AIQLTQSPSSLSASVGDRVTITCRASQGISSALVWYQQKPGKAPKLLIYDVSSLESGVPSRFSGSGSGTDFTLTISSLQPEDFATYYCQQFNDYFTFGPGTKVDIKR

SEQ ID NO: 302 - protein, 107 aa, synthetic construct
  source 1..107: note = VL-026
AIQLTQSPSSLSASVGDRVTITCRASQGITSALVWYQQKPGKAPKLLIYDASSLESGVPSRFSGSGSGTDFTLTISSLQPEDFATYYCQQFNDYFTFGPGTKVDIKR

SEQ ID NO: 303 - protein, 107 aa, synthetic construct
  source 1..107: note = VL-027
AIQLTQSPSSLSASVGDRVTITCRASQGISSALVWYQQKPGKAPKLLIYDADSLESGVPSRFSGSGSGTDFTLTISSLQPEDFATYYCQQFNDYFTFGPGTKVDIKR

SEQ ID NO: 304 - protein, 107 aa, synthetic construct
  source 1..107: note = VL-028
AIQLTQSPSSLSASVGDRVTITCRASQGIVSALVWYQQKPGKAPKLLIYDASSLESGVPSRFSGSGSGTDFTLTISSLQPEDFATYYCQQFNDYFTFGPGTKVDIKR

SEQ ID NO: 305 - protein, 107 aa, synthetic construct
  source 1..107: note = VL-029
AIQLTQSPSSLSASVGDRVTITCRASQGISIALVWYQQKPGKAPKLLIYDASSLESGVPSRFSGSGSGTDFTLTISSLQPEDFATYYCQQFNDYFTFGPGTKVDIKR

SEQ ID NO: 306 - protein, 107 aa, synthetic construct
  source 1..107: note = VL-030
AIQLTQSPSSLSASVGDRVTITCRASQGISSALVWYQQKPGKAPKLLIYDAESLESGVPSRFSGSGSGTDFTLTISSLQPEDFATYYCQQFNDYFTFGPGTKVDIKR

SEQ ID NO: 307 - protein, 107 aa, synthetic construct
  source 1..107: note = VL-031
AIQLTQSPSSLSASVGDRVTITCRASQGISLALVWYQQKPGKAPKLLIYDASSLESGVPSRFSGSGSGTDFTLTISSLQPEDFATYYCQQFNDYFTFGPGTKVDIKR

SEQ ID NO: 308 - protein, 107 aa, synthetic construct
  source 1..107: note = VL-032
AIQLTQSPSSLSASVGDRVTITCRASQGISSALVWYQQKPGKAPKLLIYDAFSLESGVPSRFSGSGSGTDFTLTISSLQPEDFATYYCQQFNDYFTFGPGTKVDIKR

SEQ ID NO: 309 - protein, 107 aa, synthetic construct
  source 1..107: note = VL-033
AIQLTQSPSSLSASVGDRVTITCRASQGISSALVWYQQKPGKAPKLLIYDASDLESGVPSRFSGSGSGTDFTLTISSLQPEDFATYYCQQFNDYFTFGPGTKVDIKR

SEQ ID NO: 310 - protein, 107 aa, synthetic construct
  source 1..107: note = VL-034
AIQLTQSPSSLSASVGDRVTITCRASQGISTALVWYQQKPGKAPKLLIYDASSLESGVPSRFSGSGSGTDFTLTISSLQPEDFATYYCQQFNDYFTFGPGTKVDIKR

SEQ ID NO: 311 - protein, 107 aa, synthetic construct
  source 1..107: note = VL-036
AIQLTQSPSSLSASVGDRVTITCRASQGISSALVWYQQKPGKAPKLLIYDASELESGVPSRFSGSGSGTDFTLTISSLQPEDFATYYCQQFNDYFTFGPGTKVDIKR

SEQ ID NO: 312 - protein, 107 aa, synthetic construct
  source 1..107: note = VL-037
AIQLTQSPSSLSASVGDRVTITCRASQGISVALVWYQQKPGKAPKLLIYDASSLESGVPSRFSGSGSGTDFTLTISSLQPEDFATYYCQQFNDYFTFGPGTKVDIKR

SEQ ID NO: 313 - protein, 107 aa, synthetic construct
  source 1..107: note = VL-038
AIQLTQSPSSLSASVGDRVTITCRASQGISSALVWYQQKPGKAPKLLIYDASFLESGVPSRFSGSGSGTDFTLTISSLQPEDFATYYCQQFNDYFTFGPGTKVDIKR

SEQ ID NO: 314 - protein, 107 aa, synthetic construct
  source 1..107: note = VL-039
AIQLTQSPSSLSASVGDRVTITCRASQGISSILVWYQQKPGKAPKLLIYDASSLESGVPSRFSGSGSGTDFTLTISSLQPEDFATYYCQQFNDYFTFGPGTKVDIKR

SEQ ID NO: 315 - protein, 107 aa, synthetic construct
  source 1..107: note = VL-040
AIQLTQSPSSLSASVGDRVTITCRASQGISSALVWYQQKPGKAPKLLIYDASRLESGVPSRFSGSGSGTDFTLTISSLQPEDFATYYCQQFNDYFTFGPGTKVDIKR

SEQ ID NO: 316 - protein, 107 aa, synthetic construct
  source 1..107: note = VL-041
AIQLTQSPSSLSASVGDRVTITCRASQGISSLLVWYQQKPGKAPKLLIYDASSLESGVPSRFSGSGSGTDFTLTISSLQPEDFATYYCQQFNDYFTFGPGTKVDIKR

SEQ ID NO: 317 - protein, 107 aa, synthetic construct
  source 1..107: note = VL-042
AIQLTQSPSSLSASVGDRVTITCRASQGISSALVWYQQKPGKAPKLLIYDASYLESGVPSRFSGSGSGTDFTLTISSLQPEDFATYYCQQFNDYFTFGPGTKVDIKR

SEQ ID NO: 318 - protein, 107 aa, synthetic construct
  source 1..107: note = VL-043
AIQLTQSPSSLSASVGDRVTITCRASQGISSTLVWYQQKPGKAPKLLIYDASSLESGVPSRFSGSGSGTDFTLTISSLQPEDFATYYCQQFNDYFTFGPGTKVDIKR

SEQ ID NO: 319 - protein, 107 aa, synthetic construct
  source 1..107: note = VL-044
AIQLTQSPSSLSASVGDRVTITCRASQGISSALVWYQQKPGKAPKLLIYDASSLESGVPSRFSGSGSGTDFTLTISSLQPEDFATYYCQQYNDYFTFGPGTKVDIKR

SEQ ID NO: 320 - protein, 107 aa, synthetic construct
  source 1..107: note = VL-045
AIQLTQSPSSLSASVGDRVTITCRASQGISSYLVWYQQKPGKAPKLLIYDASSLESGVPSRFSGSGSGTDFTLTISSLQPEDFATYYCQQFNDYFTFGPGTKVDIKR

SEQ ID NO: 321 - protein, 107 aa, synthetic construct
  source 1..107: note = VL-046
AIQLTQSPSSLSASVGDRVTITCRASQGISSALLWYQQKPGKAPKLLIYDASSLESGVPSRFSGSGSGTDFTLTISSLQPEDFATYYCQQFNDYFTFGPGTKVDIKR

SEQ ID NO: 322 - protein, 107 aa, synthetic construct
  source 1..107: note = VL-047
AIQLTQSPSSLSASVGDRVTITCRASQGISSALVWYQQKPGKAPKLLIYDASSLESGVPSRFSGSGSGTDFTLTISSLQPEDFATYYCQQFDDYFTFGPGTKVDIKR

SEQ ID NO: 323 - protein, 107 aa, synthetic construct
  source 1..107: note = VL-048
AIQLTQSPSSLSASVGDRVTITCRASQGISSALVWYQQKPGKAPKLLIYDASSLESGVPSRFSGSGSGTDFTLTISSLQPEDFATYYCQQFEDYFTFGPGTKVDIKR

SEQ ID NO: 324 - protein, 107 aa, synthetic construct
  source 1..107: note = VL-049
AIQLTQSPSSLSASVGDRVTITCRASQGISSALYWYQQKPGKAPKLLIYDASSLESGVPSRFSGSGSGTDFTLTISSLQPEDFATYYCQQFNDYFTFGPGTKVDIKR

SEQ ID NO: 325 - protein, 107 aa, synthetic construct
  source 1..107: note = VL-050
AIQLTQSPSSLSASVGDRVTITCRASQGISSALVWYQQKPGKAPKLLIYDASSLESGVPSRFSGSGSGTDFTLTISSLQPEDFATYYCQQFFDYFTFGPGTKVDIKR

SEQ ID NO: 326 - protein, 107 aa, synthetic construct
  source 1..107: note = VL-051
AIQLTQSPSSLSASVGDRVTITCRASQGISSALVWYQQKPGKAPKLLIYEASSLESGVPSRFSGSGSGTDFTLTISSLQPEDFATYYCQQFNDYFTFGPGTKVDIKR

SEQ ID NO: 327 - protein, 107 aa, synthetic construct
  source 1..107: note = VL-052
AIQLTQSPSSLSASVGDRVTITCRASQGISSALVWYQQKPGKAPKLLIYDASSLESGVPSRFSGSGSGTDFTLTISSLQPEDFATYYCQQFSDYFTFGPGTKVDIKR

SEQ ID NO: 328 - protein, 107 aa, synthetic construct
  source 1..107: note = VL-053
AIQLTQSPSSLSASVGDRVTITCRASQGISSALVWYQQKPGKAPKLLIYIASSLESGVPSRFSGSGSGTDFTLTISSLQPEDFATYYCQQFNDYFTFGPGTKVDIKR

SEQ ID NO: 329 - protein, 107 aa, synthetic construct
  source 1..107: note = VL-054
AIQLTQSPSSLSASVGDRVTITCRASQGISSALVWYQQKPGKAPKLLIYDASSLESGVPSRFSGSGSGTDFTLTISSLQPEDFATYYCQQFYDYFTFGPGTKVDIKR

SEQ ID NO: 330 - protein, 107 aa, synthetic construct
  source 1..107: note = VL-055
AIQLTQSPSSLSASVGDRVTITCRASQGISSALVWYQQKPGKAPKLLIYDFSSLESGVPSRFSGSGSGTDFTLTISSLQPEDFATYYCQQFNDYFTFGPGTKVDIKR

SEQ ID NO: 331 - protein, 107 aa, synthetic construct
  source 1..107: note = VL-057
AIQLTQSPSSLSASVGDRVTITCRASQGISSALVWYQQKPGKAPKLLIYDASSLESGVPSRFSGSGSGTDFTLTISSLQPEDFATYYCQQFNFYFTFGPGTKVDIKR

SEQ ID NO: 332 - protein, 107 aa, synthetic construct
  source 1..107: note = VL-058
AIQLTQSPSSLSASVGDRVTITCRASQGISSALVWYQQKPGKAPKLLIYDISSLESGVPSRFSGSGSGTDFTLTISSLQPEDFATYYCQQFNDYFTFGPGTKVDIKR

SEQ ID NO: 333 - protein, 107 aa, synthetic construct
  source 1..107: note = VL-059
AIQLTQSPSSLSASVGDRVTITCRASQGISSALVWYQQKPGKAPKLLIYDASSLESGVPSRFSGSGSGTDFTLTISSLQPEDFATYYCQQFNQYFTFGPGTKVDIKR

SEQ ID NO: 334 - protein, 107 aa, synthetic construct
  source 1..107: note = VL-060
AIQLTQSPSSLSASVGDRVTITCRASQGISSALVWYQQKPGKAPKLLIYDLSSLESGVPSRFSGSGSGTDFTLTISSLQPEDFATYYCQQFNDYFTFGPGTKVDIKR

SEQ ID NO: 335 - protein, 107 aa, synthetic construct
  source 1..107: note = VL-061
AIQLTQSPSSLSASVGDRVTITCRASQGISSALVWYQQKPGKAPKLLIYDASSLESGVPSRFSGSGSGTDFTLTISSLQPEDFATYYCQQFNSYFTFGPGTKVDIKR

SEQ ID NO: 336 - protein, 107 aa, synthetic construct
  source 1..107: note = VL-062
AIQLTQSPSSLSASVGDRVTITCRASQGISSALVWYQQKPGKAPKLLIYDSSSLESGVPSRFSGSGSGTDFTLTISSLQPEDFATYYCQQFNDYFTFGPGTKVDIKR

SEQ ID NO: 337 - protein, 107 aa, synthetic construct
  source 1..107: note = VL-063
AIQLTQSPSSLSASVGDRVTITCRASQGISSALVWYQQKPGKAPKLLIYDASSLESGVPSRFSGSGSGTDFTLTISSLQPEDFATYYCQQFNTYFTFGPGTKVDIKR

SEQ ID NO: 338 - protein, 107 aa, synthetic construct
  source 1..107: note = VL-064
AIQLTQSPSSLSASVGDRVTITCRASQGISSALVWYQQKPGKAPKLLIYDTSSLESGVPSRFSGSGSGTDFTLTISSLQPEDFATYYCQQFNDYFTFGPGTKVDIKR

SEQ ID NO: 339 - protein, 107 aa, synthetic construct
  source 1..107: note = VL-065
AIQLTQSPSSLSASVGDRVTITCRASQGISSALVWYQQKPGKAPKLLIYDAQSLESGVPSRFSGSGSGTDFTLTISSLQPEDFATYYCQQFNDYFTFGPGTKVDIKR

SEQ ID NO: 340 - protein, 107 aa, synthetic construct
  source 1..107: note = VL-066
AIQLTQSPSSLSASVGDRVTITCRASQGISSALVWYQQKPGKAPKLLIYDASSLESGVPSRFSGSGSGTDFTLTISSLQPEDFATYYCQQFNDDFTFGPGTKVDIKR

SEQ ID NO: 341 - protein, 107 aa, synthetic construct
  source 1..107: note = VL-067
AIQLTQSPSSLSASVGDRVTITCRASQGISSALVWYQQKPGKAPKLLIYDASSLESGVPSRFSGSGSGTDFTLTISSLQPEDFATYYCQQFNDEFTFGPGTKVDIKR

SEQ ID NO: 342 - protein, 107 aa, synthetic construct
  source 1..107: note = VL-068
AIQLTQSPSSLSASVGDRVTITCRASQGISSALVWYQQKPGKAPKLLIYDATSLESGVPSRFSGSGSGTDFTLTISSLQPEDFATYYCQQFNDYFTFGPGTKVDIKR

SEQ ID NO: 343 - protein, 107 aa, synthetic construct
  source 1..107: note = VL-069
AIQLTQSPSSLSASVGDRVTITCRASQGISSALVWYQQKPGKAPKLLIYDASSLESGVPSRFSGSGSGTDFTLTISSLQPEDFATYYCQQFNDFFTFGPGTKVDIKR

SEQ ID NO: 344 - protein, 107 aa, synthetic construct
  source 1..107: note = VL-070
AIQLTQSPSSLSASVGDRVTITCRASQGISSALVWYQQKPGKAPKLLIYDAYSLESGVPSRFSGSGSGTDFTLTISSLQPEDFATYYCQQFNDYFTFGPGTKVDIKR

SEQ ID NO: 345 - protein, 107 aa, synthetic construct
  source 1..107: note = VL-071
AIQLTQSPSSLSASVGDRVTITCRASQGISSALVWYQQKPGKAPKLLIYDASILESGVPSRFSGSGSGTDFTLTISSLQPEDFATYYCQQFNDYFTFGPGTKVDIKR

SEQ ID NO: 346 - protein, 107 aa, synthetic construct
  source 1..107: note = VL-072
AIQLTQSPSSLSASVGDRVTITCRASQGISSALVWYQQKPGKAPKLLIYDASSLESGVPSRFSGSGSGTDFTLTISSLQPEDFATYYCQQFNDSFTFGPGTKVDIKR

SEQ ID NO: 347 - protein, 107 aa, synthetic construct
  source 1..107: note = VL-073
AIQLTQSPSSLSASVGDRVTITCRASQGISSALVWYQQKPGKAPKLLIYDASLLESGVPSRFSGSGSGTDFTLTISSLQPEDFATYYCQQFNDYFTFGPGTKVDIKR

SEQ ID NO: 348 - protein, 107 aa, synthetic construct
  source 1..107: note = VL-074
AIQLTQSPSSLSASVGDRVTITCRASQGISSALVWYQQKPGKAPKLLIYDASQLESGVPSRFSGSGSGTDFTLTISSLQPEDFATYYCQQFNDYFTFGPGTKVDIKR

SEQ ID NO: 349 - protein, 107 aa, synthetic construct
  source 1..107: note = VL-076
AIQLTQSPSSLSASVGDRVTITCRASQGISSALVWYQQKPGKAPKLLIYDASTLESGVPSRFSGSGSGTDFTLTISSLQPEDFATYYCQQFNDYFTFGPGTKVDIKR

SEQ ID NO: 350 - protein, 107 aa, synthetic construct
  source 1..107: note = VL-077
AIQLTQSPSSLSASVGDRVTITCRASQGISSALVWYQQKPGKAPKLLIYDASVLESGVPSRFSGSGSGTDFTLTISSLQPEDFATYYCQQFNDYFTFGPGTKVDIKR

SEQ ID NO: 351 - protein, 107 aa, synthetic construct
  source 1..107: note = VL-078
AIQLTQSPSSLSASVGDRVTITCRASQGISSALVWYQQKPGKAPKLLIYDASSLESGVPSRFSGSGSGTDFTLTISSLQPEDFATYYCQQKNDYFTFGPGTKVDIKR

SEQ ID NO: 352 - protein, 107 aa, synthetic construct
  source 1..107: note = VL-079
AIQLTQSPSSLSASVGDRVTITCRASQGISSALVWYQQKPGKAPKLLIYDASSLESGVPSRFSGSGSGTDFTLTISSLQPEDFATYYCQQRNDYFTFGPGTKVDIKR

SEQ ID NO: 353 - protein, 107 aa, synthetic construct
  source 1..107: note = VL-080
AIQLTQSPSSLSASVGDRVTITCRASQGISSALVWYQQKPGKAPKLLIYDASSLESGVPSRFSGSGSGTDFTLTISSLQPEDFATYYCQQFQDYFTFGPGTKVDIKR

SEQ ID NO: 354 - protein, 107 aa, synthetic construct
  source 1..107: note = VL-081
AIQLTQSPSSLSASVGDRVTITCRASQGISSALVWYQQKPGKAPKLLIYDASSLESGVPSRFSGSGSGTDFTLTISSLQPEDFATYYCQQFTDYFTFGPGTKVDIKR

SEQ ID NO: 355 - protein, 107 aa, synthetic construct
  source 1..107: note = VL-082
AIQLTQSPSSLSASVGDRVTITCRASQGISSALVWYQQKPGKAPKLLIYDASSLESGVPSRFSGSGSGTDFTLTISSLQPEDFATYYCQQFNEYFTFGPGTKVDIKR

SEQ ID NO: 356 - protein, 107 aa, synthetic construct
  source 1..107: note = VL-083
AIQLTQSPSSLSASVGDRVTITCRASQGISSALVWYQQKPGKAPKLLIYDASSLESGVPSRFSGSGSGTDFTLTISSLQPEDFATYYCQQFNRYFTFGPGTKVDIKR

SEQ ID NO: 357 - protein, 107 aa, synthetic construct
  source 1..107: note = VL-084
AIQLTQSPSSLSASVGDRVTITCRASQGISSALVWYQQKPGKAPKLLIYDASSLESGVPSRFSGSGSGTDFTLTISSLQPEDFATYYCQQFNYYFTFGPGTKVDIKR

SEQ ID NO: 358 - protein, 107 aa, synthetic construct
  source 1..107: note = VL-085
AIQLTQSPSSLSASVGDRVTITCRASQGISSALVWYQQKPGKAPKLLIYDASSLESGVPSRFSGSGSGTDFTLTISSLQPEDFATYYCQQFNDQFTFGPGTKVDIKR

SEQ ID NO: 359 - protein, 107 aa, synthetic construct
  source 1..107: note = VL-087
AIQLTQSPSSLSASVGDRVTITCRASQGISSALVWYQQKPGKAPKLLIYDASSLESGVPSRFSGSGSGTDFTLTISSLQPEDFATYYCQQFNDTFTFGPGTKVDIKR

SEQ ID NO: 360 - protein, 107 aa, synthetic construct
  source 1..107: note = VL-089
AIQLTQSPSSLSASVGDRVTITCRASQGISSALVWYQQKPGKAPKLLIYFASELESGVPSRFSGSGSGTDFTLTISSLQPEDFATYYCQQFNDYFTFGPGTKVDIKR

SEQ ID NO: 361 - protein, 107 aa, synthetic construct
  source 1..107: note = VL-090
AIQLTQSPSSLSASVGDRVTITCRASQGISSALVWYQQKPGKAPKLLIYDASSLESGVPSRFSGSGSGTDFTLTISSLQPEDFATYYCQQFDFYFTFGPGTKVDIKR

SEQ ID NO: 362 - protein, 107 aa, synthetic construct
  source 1..107: note = VL-092
AIQLTQSPSSLSASVGDRVTITCRASQGISSALVWYQQKPGKAPKLLIYDASSLESGVPSRFSGSGSGTDFTLTISSLQPEDFATYYCQQFEFYFTFGPGTKVDIKR

SEQ ID NO: 363 - protein, 107 aa, synthetic construct
  source 1..107: note = VL-093
AIQLTQSPSSLSASVGDRVTITCRASQGISEALVWYQQKPGKAPKLLIYFASSLESGVPSRFSGSGSGTDFTLTISSLQPEDFATYYCQQFNDYFTFGPGTKVDIKR

SEQ ID NO: 364 - protein, 107 aa, synthetic construct
  source 1..107: note = VL-094
AIQLTQSPSSLSASVGDRVTITCRASQGISFALVWYQQKPGKAPKLLIYEASSLESGVPSRFSGSGSGTDFTLTISSLQPEDFATYYCQQFNDYFTFGPGTKVDIKR

SEQ ID NO: 365 - protein, 107 aa, synthetic construct
  source 1..107: note = VL-095
AIQLTQSPSSLSASVGDRVTITCRASQGISEALVWYQQKPGKAPKLLIYDASELESGVPSRFSGSGSGTDFTLTISSLQPEDFATYYCQQFNDYFTFGPGTKVDIKR

SEQ ID NO: 366 - protein, 107 aa, synthetic construct
  source 1..107: note = VL-096
AIQLTQSPSSLSASVGDRVTITCRASQGISFALVWYQQKPGKAPKLLIYFASSLESGVPSRFSGSGSGTDFTLTISSLQPEDFATYYCQQFNDYFTFGPGTKVDIKR

SEQ ID NO: 367 - protein, 107 aa, synthetic construct
  source 1..107: note = VL-097
AIQLTQSPSSLSASVGDRVTITCRASQGISFALVWYQQKPGKAPKLLIYDASELESGVPSRFSGSGSGTDFTLTISSLQPEDFATYYCQQFNDYFTFGPGTKVDIKR

SEQ ID NO: 368 - protein, 107 aa, synthetic construct
  source 1..107: note = VL-098
AIQLTQSPSSLSASVGDRVTITCRASQGISFALVWYQQKPGKAPKLLIYDAESLESGVPSRFSGSGSGTDFTLTISSLQPEDFATYYCQQFNDYFTFGPGTKVDIKR

SEQ ID NO: 369 - protein, 18 aa, synthetic construct
  source 1..18: note = Heavy Chain Leader Sequence
MKWVTFISLLFLFSSAYS

SEQ ID NO: 370 - protein, 20 aa, synthetic construct
  source 1..20: note = Light Chain Leader Sequence
MVSSAQFLGLLLLCFQGTRC

SEQ ID NO: 371 - protein, 446 aa, synthetic construct
  source 1..446: note = Burosumab Heavy Chain C-Terminal Lysine Deleted
QVQLVQSGAEVKKPGASVKVSCKASGYTFTNHYMHWVRQAPGQGLEWMGIINPISGSTSNAQKFQGRVTMTRDTSTSTVYMELSSLRSEDTAVYYCARDIVDAFDFWGQGTMVTVSSASTKGPSVFPLAPSSKSTSGGTAALGCLVKDYFPEPVTVSWNSGALTSGVHTFPAVLQSSGLYSLSSVVTVPSSSLGTQTYICNVNHKPSNTKVDKKVEPKSCDKTHTCPPCPAPELLGGPSVFLFPPKPKDTLMISRTPEVTCVVVDVSHEDPEVKFNWYVDGVEVHNAKTKPREEQYNSTYRVVSVLTVLHQDWLNGKEYKCKVSNKALPAPIEKTISKAKGQPREPQVYTLPPSRDELTKNQVSLTCLVKGFYPSDIAVEWESNGQPENNYKTTPPVLDSDGSFFLYSKLTVDKSRWQQGNVFSCSVMHEALHNHYTQKSLSLSPG

SEQ ID NO: 372 - protein, 251 aa, Macaca fascicularis
  source 1..251: note = Macaca fascicularis FGF23 (R179Q)
MLGARLRLWVCALCSVCSMSVIRAYPNASPLLGSSWGGLIHLYTATARNSYHLQIHKNGHVDGAPHQTIYSALMIRSEDAGFVVITGVMSRRYLCMDFRGNIFGSHYFNPENCRFRHWTLENGYDVYHSPQHHFLVSLGRAKRAFLPGMNPPPYSQFLSRRNEIPLIHFNTPRPRRHTQSAEDDSERDPLNVLKPRARMTPAPASCSQELPSAEDNSPVASDPLGVVRGGRVNTHAGGTGPEACRPFPKFI

SEQ ID NO: 373 - protein, 5 aa, synthetic construct
  source 1..5: note = HCDR1-46
NKYMH

SEQ ID NO: 374 - protein, 5 aa, synthetic construct
  source 1..5: note = HCDR1-47
NYYMH

SEQ ID NO: 375 - protein, 5 aa, synthetic construct
  source 1..5: note = HCDR1-48
NHDMH

SEQ ID NO: 376 - protein, 5 aa, synthetic construct
  source 1..5: note = HCDR1-49
NHLMH

SEQ ID NO: 377 - protein, 5 aa, synthetic construct
  source 1..5: note = HCDR1-50
NHRMH

SEQ ID NO: 378 - protein, 17 aa, synthetic construct
  source 1..17: note = HCDR2-51
IIEPISGSTSNAQKFQG

SEQ ID NO: 379 - protein, 17 aa, synthetic construct
  source 1..17: note = HCDR2-52
IIQPISGSTSNAQKFQG

SEQ ID NO: 380 - protein, 17 aa, synthetic construct
  source 1..17: note = HCDR2-53
IIRPISGSTSNAQKFQG

SEQ ID NO: 381 - protein, 17 aa, synthetic construct
  source 1..17: note = HCDR2-54
IINPIEGSTSNAQKFQG

SEQ ID NO: 382 - protein, 17 aa, synthetic construct
  source 1..17: note = HCDR2-55
IINPIFGSTSNAQKFQG

SEQ ID NO: 383 - protein, 17 aa, synthetic construct
  source 1..17: note = HCDR2-56
IINPIIGSTSNAQKFQG

SEQ ID NO: 384 - protein, 17 aa, synthetic construct
  source 1..17: note = HCDR2-57
IINPIQGSTSNAQKFQG

SEQ ID NO: 385 - protein, 17 aa, synthetic construct
  source 1..17: note = HCDR2-58
IINPIRGSTSNAQKFQG

SEQ ID NO: 386 - protein, 17 aa, synthetic construct
  source 1..17: note = HCDR2-59
IINPIYGSTSNAQKFQG

SEQ ID NO: 387 - protein, 17 aa, synthetic construct
  source 1..17: note = HCDR2-60
IINPISGETSNAQKFQG

SEQ ID NO: 388 - protein, 17 aa, synthetic construct
  source 1..17: note = HCDR2-61
IINPISGFTSNAQKFQG

SEQ ID NO: 389 - protein, 17 aa, synthetic construct
  source 1..17: note = HCDR2-62
IINPISGRTSNAQKFQG

SEQ ID NO: 390 - protein, 17 aa, synthetic construct
  source 1..17: note = HCDR2-63
IINPISGYTSNAQKFQG

SEQ ID NO: 391 - protein, 17 aa, synthetic construct
  source 1..17: note = HCDR2-64
IINPISGSFSNAQKFQG

SEQ ID NO: 392 - protein, 17 aa, synthetic construct
  source 1..17: note = HCDR2-65
IINPISGSRSNAQKFQG

SEQ ID NO: 393 - protein, 17 aa, synthetic construct
  source 1..17: note = HCDR2-66
IINPISGSTFNAQKFQG

SEQ ID NO: 394 - protein, 17 aa, synthetic construct
  source 1..17: note = HCDR2-67
IINPISGSTRNAQKFQG

SEQ ID NO: 395 - protein, 17 aa, synthetic construct
  source 1..17: note = HCDR2-68
IINPISGSTYNAQKFQG

SEQ ID NO: 396 - protein, 17 aa, synthetic construct
  source 1..17: note = HCDR2-69
IINPISGSTSEAQKFQG

SEQ ID NO: 397 - protein, 17 aa, synthetic construct
  source 1..17: note = HCDR2-70
IINPISGSTSRAQKFQG

SEQ ID NO: 398 - protein, 17 aa, synthetic construct
  source 1..17: note = HCDR2-71
IINPISGSTSYAQKFQG

SEQ ID NO: 399 - protein, 17 aa, synthetic construct
  source 1..17: note = HCDR2-72
IINPISGSTSNFQKFQG

SEQ ID NO: 400 - protein, 17 aa, synthetic construct
  source 1..17: note = HCDR2-73
IINPISGSTSNRQKFQG

SEQ ID NO: 401 - protein, 17 aa, synthetic construct
  source 1..17: note = HCDR2-74
IINPISGSTSNYQKFQG

SEQ ID NO: 402 - protein, 17 aa, synthetic construct
  source 1..17: note = HCDR2-75
IINPISGSTSNALKFQG

SEQ ID NO: 403 - protein, 17 aa, synthetic construct
  source 1..17: note = HCDR2-76
IINPISGSTSNARKFQG

SEQ ID NO: 404 - protein, 17 aa, synthetic construct
  source 1..17: note = HCDR2-77
IINPISGSTSNAYKFQG

SEQ ID NO: 405 - protein, 17 aa, synthetic construct
  source 1..17: note = HCDR2-78
IINPISGSTSNAQKFEG

SEQ ID NO: 406 - protein, 17 aa, synthetic construct
  source 1..17: note = HCDR2-79
IINPISGSTSNAQKFRG

SEQ ID NO: 407 - protein, 17 aa, synthetic construct
  source 1..17: note = HCDR2-80
IINPISGSTSNAQKFYG

SEQ ID NO: 408 - protein, 8 aa, synthetic construct
  source 1..8: note = HCDR3-81
FIVDAFDF

SEQ ID NO: 409 - protein, 8 aa, synthetic construct
  source 1..8: note = HCDR3-82
RIVDAFDF

SEQ ID NO: 410 - protein, 8 aa, synthetic construct
  source 1..8: note = HCDR3-83
YIVDAFDF

SEQ ID NO: 411 - protein, 8 aa, synthetic construct
  source 1..8: note = HCDR3-84
DEVDAFDF

SEQ ID NO: 412 - protein, 8 aa, synthetic construct
  source 1..8: note = HCDR3-85
DFVDAFDF

SEQ ID NO: 413 - protein, 8 aa, synthetic construct
  source 1..8: note = HCDR3-86
DYVDAFDF

SEQ ID NO: 414 - protein, 8 aa, synthetic construct
  source 1..8: note = HCDR3-87
DIEDAFDF

SEQ ID NO: 415 - protein, 8 aa, synthetic construct
  source 1..8: note = HCDR3-88
DIFDAFDF

SEQ ID NO: 416 - protein, 8 aa, synthetic construct
  source 1..8: note = HCDR3-89
DILDAFDF

SEQ ID NO: 417 - protein, 8 aa, synthetic construct
  source 1..8: note = HCDR3-90
DIQDAFDF

SEQ ID NO: 418 - protein, 8 aa, synthetic construct
  source 1..8: note = HCDR3-91
DIRDAFDF

SEQ ID NO: 419 - protein, 8 aa, synthetic construct
  source 1..8: note = HCDR3-92
DIVEAFDF

SEQ ID NO: 420 - protein, 8 aa, synthetic construct
  source 1..8: note = HCDR3-93
DIVFAFDF

SEQ ID NO: 421 - protein, 8 aa, synthetic construct
  source 1..8: note = HCDR3-94
DIVKAFDF

SEQ ID NO: 422 - protein, 8 aa, synthetic construct
  source 1..8: note = HCDR3-95
DIVRAFDF

SEQ ID NO: 423 - protein, 8 aa, synthetic construct
  source 1..8: note = HCDR3-96
DIVYAFDF

SEQ ID NO: 424 - protein, 11 aa, synthetic construct
  source 1..11: note = LCDR1-01
RASFGISSALV

SEQ ID NO: 425 - protein, 11 aa, synthetic construct
  source 1..11: note = LCDR1-02
RASRGISSALV

SEQ ID NO: 426 - protein, 11 aa, synthetic construct
  source 1..11: note = LCDR1-03
RASQDISSALV

SEQ ID NO: 427 - protein, 11 aa, synthetic construct
  source 1..11: note = LCDR1-04
RASQQISSALV

SEQ ID NO: 428 - protein, 11 aa, synthetic construct
  source 1..11: note = LCDR1-05
RASQRISSALV

SEQ ID NO: 429 - protein, 11 aa, synthetic construct
  source 1..11: note = LCDR1-06
RASQYISSALV

SEQ ID NO: 430 - protein, 11 aa, synthetic construct
  source 1..11: note = LCDR1-07
RASQGIDSALV

SEQ ID NO: 431 - protein, 11 aa, synthetic construct
  source 1..11: note = LCDR1-08
RASQGIFSALV

SEQ ID NO: 432 - protein, 11 aa, synthetic construct
  source 1..11: note = LCDR1-09
RASQGIRSALV

SEQ ID NO: 433 - protein, 11 aa, synthetic construct
  source 1..11: note = LCDR1-10
RASQGIYSALV

SEQ ID NO: 434 - protein, 11 aa, synthetic construct
  source 1..11: note = LCDR1-11
RASQGISFALV

SEQ ID NO: 435 - protein, 11 aa, synthetic construct
  source 1..11: note = LCDR1-12
RASQGISYALV

SEQ ID NO: 436 - protein, 7 aa, synthetic construct
  source 1..7: note = LCDR2-13
EASSLES

SEQ ID NO: 437 - protein, 7 aa, synthetic construct
  source 1..7: note = LCDR2-14
QASSLES

SEQ ID NO: 438 - protein, 7 aa, synthetic construct
  source 1..7: note = LCDR2-15
RASSLES

SEQ ID NO: 439 - protein, 7 aa, synthetic construct
  source 1..7: note = LCDR2-16
YASSLES

SEQ ID NO: 440 - protein, 7 aa, synthetic construct
  source 1..7: note = LCDR2-17
DAESLES

SEQ ID NO: 441 - protein, 7 aa, synthetic construct
  source 1..7: note = LCDR2-18
DAQSLES

SEQ ID NO: 442 - protein, 7 aa, synthetic construct
  source 1..7: note = LCDR2-19
DARSLES

SEQ ID NO: 443 - protein, 7 aa, synthetic construct
  source 1..7: note = LCDR2-20
DAYSLES

SEQ ID NO: 444 - protein, 7 aa, synthetic construct
  source 1..7: note = LCDR2-21
DASRLES

SEQ ID NO: 445 - protein, 7 aa, synthetic construct
  source 1..7: note = LCDR2-22
DASYLES

SEQ ID NO: 446 - protein, 7 aa, synthetic construct
  source 1..7: note = LCDR2-23
DASSEES

SEQ ID NO: 447 - protein, 7 aa, synthetic construct
  source 1..7: note = LCDR2-24
DASSYES

SEQ ID NO: 448 - protein, 7 aa, synthetic construct
  source 1..7: note = LCDR2-25
DASSLRS

SEQ ID NO: 449 - protein, 7 aa, synthetic construct
  source 1..7: note = LCDR2-26
DASSLYS

SEQ ID NO: 450 - protein, 8 aa, synthetic construct
  source 1..8: note = LCDR3-32
QQENDYFT

SEQ ID NO: 451 - protein, 8 aa, synthetic construct
  source 1..8: note = LCDR3-33
QQRNDYFT

SEQ ID NO: 452 - protein, 8 aa, synthetic construct
  source 1..8: note = LCDR3-34
QQFEDYFT

SEQ ID NO: 453 - protein, 8 aa, synthetic construct
  source 1..8: note = LCDR3-35
QQFFDYFT

SEQ ID NO: 454 - protein, 8 aa, synthetic construct
  source 1..8: note = LCDR3-36
QQFQDYFT

SEQ ID NO: 455 - protein, 8 aa, synthetic construct
  source 1..8: note = LCDR3-37
QQFRDYFT

SEQ ID NO: 456 - protein, 8 aa, synthetic construct
  source 1..8: note = LCDR3-38
QQFYDYFT

SEQ ID NO: 457 - protein, 8 aa, synthetic construct
  source 1..8: note = LCDR3-39
QQFNFYFT

SEQ ID NO: 458 - protein, 8 aa, synthetic construct
  source 1..8: note = LCDR3-40
QQFNRYFT

SEQ ID NO: 459 - protein, 8 aa, synthetic construct
  source 1..8: note = LCDR3-41
QQFNYYFT

SEQ ID NO: 460 - protein, 8 aa, synthetic construct
  source 1..8: note = LCDR3-42
QQFNDEFT

SEQ ID NO: 461 - protein, 8 aa, synthetic construct
  source 1..8: note = LCDR3-43
QQFNDRFT

SEQ ID NO: 462 - protein, 117 aa, synthetic construct
  source 1..117: note = VH44
QVQLVQSGAEVKKPGASVKVSCKASGYYFTNHYMHWVRQAPGQGLEWMGIINPISGSTSNAQKFQGRVTMTRDTSTSTVYMELSSLRSEDTAVYYCARDIVDAFDFWGQGTMVTVSS

SEQ ID NO: 463 - protein, 117 aa, synthetic construct
  source 1..117: note = VH45
QVQLVQSGAEVKKPGASVKVSCKASGYTFKNHYMHWVRQAPGQGLEWMGIINPISGSTSNAQKFQGRVTMTRDTSTSTVYMELSSLRSEDTAVYYCARDIVDAFDFWGQGTMVTVSS

SEQ ID NO: 464 - protein, 117 aa, synthetic construct
  source 1..117: note = VH46
QVQLVQSGAEVKKPGASVKVSCKASGYTFTNKYMHWVRQAPGQGLEWMGIINPISGSTSNAQKFQGRVTMTRDTSTSTVYMELSSLRSEDTAVYYCARDIVDAFDFWGQGTMVTVSS

SEQ ID NO: 465 - protein, 117 aa, synthetic construct
  source 1..117: note = VH47
QVQLVQSGAEVKKPGASVKVSCKASGYTFTNYYMHWVRQAPGQGLEWMGIINPISGSTSNAQKFQGRVTMTRDTSTSTVYMELSSLRSEDTAVYYCARDIVDAFDFWGQGTMVTVSS

SEQ ID NO: 466 - protein, 117 aa, synthetic construct
  source 1..117: note = VH48
QVQLVQSGAEVKKPGASVKVSCKASGYTFTNHDMHWVRQAPGQGLEWMGIINPISGSTSNAQKFQGRVTMTRDTSTSTVYMELSSLRSEDTAVYYCARDIVDAFDFWGQGTMVTVSS

SEQ ID NO: 467 - protein, 117 aa, synthetic construct
  source 1..117: note = VH49
QVQLVQSGAEVKKPGASVKVSCKASGYTFTNHLMHWVRQAPGQGLEWMGIINPISGSTSNAQKFQGRVTMTRDTSTSTVYMELSSLRSEDTAVYYCARDIVDAFDFWGQGTMVTVSS

SEQ ID NO: 468 - protein, 117 aa, synthetic construct
  source 1..117: note = VH50
QVQLVQSGAEVKKPGASVKVSCKASGYTFTNHRMHWVRQAPGQGLEWMGIINPISGSTSNAQKFQGRVTMTRDTSTSTVYMELSSLRSEDTAVYYCARDIVDAFDFWGQGTMVTVSS

SEQ ID NO: 469 - protein, 117 aa, synthetic construct; identical to SEQ ID NO: 249
  source 1..117: note = VH51

SEQ ID NO: 470 - protein, 117 aa, synthetic construct; identical to SEQ ID NO: 250
  source 1..117: note = VH52

SEQ ID NO: 471 - protein, 117 aa, synthetic construct
  source 1..117: note = VH53
QVQLVQSGAEVKKPGASVKVSCKASGYTFTNHYMHWVRQAPGQGLEWMGIIRPISGSTSNAQKFQGRVTMTRDTSTSTVYMELSSLRSEDTAVYYCARDIVDAFDFWGQGTMVTVSS

SEQ ID NO: 472 - protein, 117 aa, synthetic construct; identical to SEQ ID NO: 257
  source 1..117: note = VH54

SEQ ID NO: 473 - protein, 117 aa, synthetic construct; identical to SEQ ID NO: 258
  source 1..117: note = VH55

SEQ ID NO: 474 - protein, 117 aa, synthetic construct
  source 1..117: note = VH56
QVQLVQSGAEVKKPGASVKVSCKASGYTFTNHYMHWVRQAPGQGLEWMGIINPIIGSTSNAQKFQGRVTMTRDTSTSTVYMELSSLRSEDTAVYYCARDIVDAFDFWGQGTMVTVSS

SEQ ID NO: 475 - protein, 117 aa, synthetic construct; identical to SEQ ID NO: 259
  source 1..117: note = VH57

SEQ ID NO: 476 - protein, 117 aa, synthetic construct
  source 1..117: note = VH58
QVQLVQSGAEVKKPGASVKVSCKASGYTFTNHYMHWVRQAPGQGLEWMGIINPIRGSTSNAQKFQGRVTMTRDTSTSTVYMELSSLRSEDTAVYYCARDIVDAFDFWGQGTMVTVSS

SEQ ID NO: 477 - protein, 117 aa, synthetic construct; identical to SEQ ID NO: 264
  source 1..117: note = VH59

SEQ ID NO: 478 - protein, 117 aa, synthetic construct
  source 1..117: note = VH60
QVQLVQSGAEVKKPGASVKVSCKASGYTFTNHYMHWVRQAPGQGLEWMGIINPISGETSNAQKFQGRVTMTRDTSTSTVYMELSSLRSEDTAVYYCARDIVDAFDFWGQGTMVTVSS

SEQ ID NO: 479 - protein, 117 aa, synthetic construct
  source 1..117: note = VH61
QVQLVQSGAEVKKPGASVKVSCKASGYTFTNHYMHWVRQAPGQGLEWMGIINPISGFTSNAQKFQGRVTMTRDTSTSTVYMELSSLRSEDTAVYYCARDIVDAFDFWGQGTMVTVSS

SEQ ID NO: 480 - protein, 117 aa, synthetic construct
  source 1..117: note = VH62
QVQLVQSGAEVKKPGASVKVSCKASGYTFTNHYMHWVRQAPGQGLEWMGIINPISGRTSNAQKFQGRVTMTRDTSTSTVYMELSSLRSEDTAVYYCARDIVDAFDFWGQGTMVTVSS

SEQ ID NO: 481 - protein, 117 aa, synthetic construct
  source 1..117: note = VH63
QVQLVQSGAEVKKPGASVKVSCKASGYTFTNHYMHWVRQAPGQGLEWMGIINPISGYTSNAQKFQGRVTMTRDTSTSTVYMELSSLRSEDTAVYYCARDIVDAFDFWGQGTMVTVSS

SEQ ID NO: 482 - protein, 117 aa, synthetic construct
  source 1..117: note = VH64
QVQLVQSGAEVKKPGASVKVSCKASGYTFTNHYMHWVRQAPGQGLEWMGIINPISGSFSNAQKFQGRVTMTRDTSTSTVYMELSSLRSEDTAVYYCARDIVDAFDFWGQGTMVTVSS

SEQ ID NO: 483 - protein, 117 aa, synthetic construct
  source 1..117: note = VH65
QVQLVQSGAEVKKPGASVKVSCKASGYTFTNHYMHWVRQAPGQGLEWMGIINPISGSRSNAQKFQGRVTMTRDTSTSTVYMELSSLRSEDTAVYYCARDIVDAFDFWGQGTMVTVSS

SEQ ID NO: 484 - protein, 117 aa, synthetic construct; identical to SEQ ID NO: 216
  source 1..117: note = VH66

SEQ ID NO: 485 - protein, 117 aa, synthetic construct
  source 1..117: note = VH67
QVQLVQSGAEVKKPGASVKVSCKASGYTFTNHYMHWVRQAPGQGLEWMGIINPISGSTRNAQKFQGRVTMTRDTSTSTVYMELSSLRSEDTAVYYCARDIVDAFDFWGQGTMVTVSS

SEQ ID NO: 486 - protein, 117 aa, synthetic construct; identical to SEQ ID NO: 228
  source 1..117: note = VH68

SEQ ID NO: 487 - protein, 117 aa, synthetic construct
  source 1..117: note = VH69
QVQLVQSGAEVKKPGASVKVSCKASGYTFTNHYMHWVRQAPGQGLEWMGIINPISGSTSEAQKFQGRVTMTRDTSTSTVYMELSSLRSEDTAVYYCARDIVDAFDFWGQGTMVTVSS

SEQ ID NO: 488 - protein, 117 aa, synthetic construct
  source 1..117: note = VH70
QVQLVQSGAEVKKPGASVKVSCKASGYTFTNHYMHWVRQAPGQGLEWMGIINPISGSTSRAQKFQGRVTMTRDTSTSTVYMELSSLRSEDTAVYYCARDIVDAFDFWGQGTMVTVSS

SEQ ID NO: 489 - protein, 117 aa, synthetic construct
  source 1..117: note = VH71
QVQLVQSGAEVKKPGASVKVSCKASGYTFTNHYMHWVRQAPGQGLEWMGIINPISGSTSYAQKFQGRVTMTRDTSTSTVYMELSSLRSEDTAVYYCARDIVDAFDFWGQGTMVTVSS

SEQ ID NO: 490 - protein, 117 aa, synthetic construct
  source 1..117: note = VH72
QVQLVQSGAEVKKPGASVKVSCKASGYTFTNHYMHWVRQAPGQGLEWMGIINPISGSTSNFQKFQGRVTMTRDTSTSTVYMELSSLRSEDTAVYYCARDIVDAFDFWGQGTMVTVSS

SEQ ID NO: 491 - protein, 117 aa, synthetic construct
  source 1..117: note = VH73
QVQLVQSGAEVKKPGASVKVSCKASGYTFTNHYMHWVRQAPGQGLEWMGIINPISGSTSNRQKFQGRVTMTRDTSTSTVYMELSSLRSEDTAVYYCARDIVDAFDFWGQGTMVTVSS

SEQ ID NO: 492 - protein, 117 aa, synthetic construct
  source 1..117: note = VH74
QVQLVQSGAEVKKPGASVKVSCKASGYTFTNHYMHWVRQAPGQGLEWMGIINPISGSTSNYQKFQGRVTMTRDTSTSTVYMELSSLRSEDTAVYYCARDIVDAFDFWGQGTMVTVSS

SEQ ID NO: 493 - protein, 117 aa, synthetic construct
  source 1..117: note = VH75
QVQLVQSGAEVKKPGASVKVSCKASGYTFTNHYMHWVRQAPGQGLEWMGIINPISGSTSNALKFQGRVTMTRDTSTSTVYMELSSLRSEDTAVYYCARDIVDAFDFWGQGTMVTVSS

SEQ ID NO: 494 - protein, 117 aa, synthetic construct
  source 1..117: note = VH76
QVQLVQSGAEVKKPGASVKVSCKASGYTFTNHYMHWVRQAPGQGLEWMGIINPISGSTSNARKFQGRVTMTRDTSTSTVYMELSSLRSEDTAVYYCARDIVDAFDFWGQGTMVTVSS

SEQ ID NO: 495 - protein, 117 aa, synthetic construct
  source 1..117: note = VH77
QVQLVQSGAEVKKPGASVKVSCKASGYTFTNHYMHWVRQAPGQGLEWMGIINPISGSTSNAYKFQGRVTMTRDTSTSTVYMELSSLRSEDTAVYYCARDIVDAFDFWGQGTMVTVSS

SEQ ID NO: 496 - protein, 117 aa, synthetic construct
  source 1..117: note = VH78
QVQLVQSGAEVKKPGASVKVSCKASGYTFTNHYMHWVRQAPGQGLEWMGIINPISGSTSNAQKFEGRVTMTRDTSTSTVYMELSSLRSEDTAVYYCARDIVDAFDFWGQGTMVTVSS

SEQ ID NO: 497 - protein, 117 aa, synthetic construct
  source 1..117: note = VH79
QVQLVQSGAEVKKPGASVKVSCKASGYTFTNHYMHWVRQAPGQGLEWMGIINPISGSTSNAQKFRGRVTMTRDTSTSTVYMELSSLRSEDTAVYYCARDIVDAFDFWGQGTMVTVSS

SEQ ID NO: 498 - protein, 117 aa, synthetic construct
  source 1..117: note = VH80
QVQLVQSGAEVKKPGASVKVSCKASGYTFTNHYMHWVRQAPGQGLEWMGIINPISGSTSNAQKFYGRVTMTRDTSTSTVYMELSSLRSEDTAVYYCARDIVDAFDFWGQGTMVTVSS

SEQ ID NO: 499 - protein, 117 aa, synthetic construct
  source 1..117: note = VH81
QVQLVQSGAEVKKPGASVKVSCKASGYTFTNHYMHWVRQAPGQGLEWMGIINPISGSTSNAQKFQGRVTMTRDTSTSTVYMELSSLRSEDTAVYYCARFIVDAFDFWGQGTMVTVSS

SEQ ID NO: 500 - protein, 117 aa, synthetic construct
  source 1..117: note = VH82
QVQLVQSGAEVKKPGASVKVSCKASGYTFTNHYMHWVRQAPGQGLEWMGIINPISGSTSNAQKFQGRVTMTRDTSTSTVYMELSSLRSEDTAVYYCARRIVDAFDFWGQGTMVTVSS

SEQ ID NO: 501 - protein, 117 aa, synthetic construct; identical to SEQ ID NO: 188
  source 1..117: note = VH83

SEQ ID NO: 502 - protein, 117 aa, synthetic construct; identical to SEQ ID NO: 232
  source 1..117: note = VH84

SEQ ID NO: 503 - protein, 117 aa, synthetic construct; identical to SEQ ID NO: 234
  source 1..117: note = VH85

SEQ ID NO: 504 - protein, 117 aa, synthetic construct; identical to SEQ ID NO: 192
  source 1..117: note = VH86

SEQ ID NO: 505 - protein, 117 aa, synthetic construct
  source 1..117: note = VH87
QVQLVQSGAEVKKPGASVKVSCKASGYTFTNHYMHWVRQAPGQGLEWMGIINPISGSTSNAQKFQGRVTMTRDTSTSTVYMELSSLRSEDTAVYYCARDIEDAFDFWGQGTMVTVSS

SEQ ID NO: 506 - protein, 117 aa, synthetic construct; identical to SEQ ID NO: 236
  source 1..117: note = VH88

SEQ ID NO: 507 - protein, 117 aa, synthetic construct; identical to SEQ ID NO: 240
  source 1..117: note = VH89

SEQ ID NO: 508 - protein, 117 aa, synthetic construct
  source 1..117: note = VH90
QVQLVQSGAEVKKPGASVKVSCKASGYTFTNHYMHWVRQAPGQGLEWMGIINPISGSTSNAQKFQGRVTMTRDTSTSTVYMELSSLRSEDTAVYYCARDIQDAFDFWGQGTMVTVSS

SEQ ID NO: 509 - protein, 117 aa, synthetic construct
  source 1..117: note = VH91
QVQLVQSGAEVKKPGASVKVSCKASGYTFTNHYMHWVRQAPGQGLEWMGIINPISGSTSNAQKFQGRVTMTRDTSTSTVYMELSSLRSEDTAVYYCARDIRDAFDFWGQGTMVTVSS

SEQ ID NO: 510 - protein, 117 aa, synthetic construct; identical to SEQ ID NO: 195
  source 1..117: note = VH92

SEQ ID NO: 511 - protein, 117 aa, synthetic construct; identical to SEQ ID NO: 196
  source 1..117: note = VH93

SEQ ID NO: 512 - protein, 117 aa, synthetic construct
  source 1..117: note = VH94
QVQLVQSGAEVKKPGASVKVSCKASGYTFTNHYMHWVRQAPGQGLEWMGIINPISGSTSNAQKFQGRVTMTRDTSTSTVYMELSSLRSEDTAVYYCARDIVKAFDFWGQGTMVTVSS

SEQ ID NO: 513 - protein, 117 aa, synthetic construct
  source 1..117: note = VH95
QVQLVQSGAEVKKPGASVKVSCKASGYTFTNHYMHWVRQAPGQGLEWMGIINPISGSTSNAQKFQGRVTMTRDTSTSTVYMELSSLRSEDTAVYYCARDIVRAFDFWGQGTMVTVSS

SEQ ID NO: 514 - protein, 117 aa, synthetic construct; identical to SEQ ID NO: 200
  source 1..117: note = VH96

SEQ ID NO: 515 - protein, 107 aa, synthetic construct
  source 1..107: note = VL01
AIQLTQSPSSLSASVGDRVTITCRASFGISSALVWYQQKPGKAPKLLIYDASSLESGVPSRFSGSGSGTDFTLTISSLQPEDFATYYCQQFNDYFTFGPGTKVDIKR

SEQ ID NO: 516 - protein, 107 aa, synthetic construct
  source 1..107: note = VL02
AIQLTQSPSSLSASVGDRVTITCRASRGISSALVWYQQKPGKAPKLLIYDASSLESGVPSRFSGSGSGTDFTLTISSLQPEDFATYYCQQFNDYFTFGPGTKVDIKR

SEQ ID NO: 517 - protein, 107 aa, synthetic construct
  source 1..107: note = VL03
AIQLTQSPSSLSASVGDRVTITCRASQDISSALVWYQQKPGKAPKLLIYDASSLESGVPSRFSGSGSGTDFTLTISSLQPEDFATYYCQQFNDYFTFGPGTKVDIKR

SEQ ID NO: 518 - protein, 107 aa, synthetic construct
  source 1..107: note = VL04
AIQLTQSPSSLSASVGDRVTITCRASQQISSALVWYQQKPGKAPKLLIYDASSLESGVPSRFSGSGSGTDFTLTISSLQPEDFATYYCQQFNDYFTFGPGTKVDIKR

SEQ ID NO: 519 - protein, 107 aa, synthetic construct
  source 1..107: note = VL05
AIQLTQSPSSLSASVGDRVTITCRASQRISSALVWYQQKPGKAPKLLIYDASSLESGVPSRFSGSGSGTDFTLTISSLQPEDFATYYCQQFNDYFTFGPGTKVDIKR

SEQ ID NO: 520 - protein, 107 aa, synthetic construct
  source 1..107: note = VL06
AIQLTQSPSSLSASVGDRVTITCRASQYISSALVWYQQKPGKAPKLLIYDASSLESGVPSRFSGSGSGTDFTLTISSLQPEDFATYYCQQFNDYFTFGPGTKVDIKR

SEQ ID NO: 521 - protein, 107 aa, synthetic construct; identical to SEQ ID NO: 273
  source 1..107: note = VL07

SEQ ID NO: 522 - protein, 107 aa, synthetic construct; identical to SEQ ID NO: 275
  source 1..107: note = VL08

SEQ ID NO: 523 - protein, 107 aa, synthetic construct
  source 1..107: note = VL09
AIQLTQSPSSLSASVGDRVTITCRASQGIRSALVWYQQKPGKAPKLLIYDASSLESGVPSRFSGSGSGTDFTLTISSLQPEDFATYYCQQFNDYFTFGPGTKVDIKR

SEQ ID NO: 524 - protein, 107 aa, synthetic construct; identical to SEQ ID NO: 278
  source 1..107: note = VL10

SEQ ID NO: 525 - protein, 107 aa, synthetic construct; identical to SEQ ID NO: 281
  source 1..107: note = VL11

SEQ ID NO: 526 - protein, 107 aa, synthetic construct; identical to SEQ ID NO: 283
  source 1..107: note = VL12

SEQ ID NO: 527 - protein, 107 aa, synthetic construct; identical to SEQ ID NO: 326
  source 1..107: note = VL13

SEQ ID NO: 528 - protein, 107 aa, synthetic construct; identical to SEQ ID NO: 292
  source 1..107: note = VL14

SEQ ID NO: 529 - protein, 107 aa, synthetic construct; identical to SEQ ID NO: 293
  source 1..107: note = VL15

SEQ ID NO: 530 - protein, 107 aa, synthetic construct
  source 1..107: note = VL16
AIQLTQSPSSLSASVGDRVTITCRASQGISSALVWYQQKPGKAPKLLIYYASSLESGVPSRFSGSGSGTDFTLTISSLQPEDFATYYCQQFNDYFTFGPGTKVDIKR

SEQ ID NO: 531 - protein, 107 aa, synthetic construct; identical to SEQ ID NO: 306
  source 1..107: note = VL17

SEQ ID NO: 532 - protein, 107 aa, synthetic construct; identical to SEQ ID NO: 339
  source 1..107: note = VL18

SEQ ID NO: 533 - protein, 107 aa, synthetic construct
  source 1..107: note = VL19
AIQLTQSPSSLSASVGDRVTITCRASQGISSALVWYQQKPGKAPKLLIYDARSLESGVPSRFSGSGSGTDFTLTISSLQPEDFATYYCQQFNDYFTFGPGTKVDIKR

SEQ ID NO: 534 - protein, 107 aa, synthetic construct; identical to SEQ ID NO: 344
  source 1..107: note = VL20

SEQ ID NO: 535 - protein, 107 aa, synthetic construct; identical to SEQ ID NO: 315
  source 1..107: note = VL21

SEQ ID NO: 536 - protein, 107 aa, synthetic construct; identical to SEQ ID NO: 317
  source 1..107: note = VL22

SEQ ID NO: 537 - protein, 107 aa, synthetic construct
  source 1..107: note = VL23
AIQLTQSPSSLSASVGDRVTITCRASQGISSALVWYQQKPGKAPKLLIYDASSEESGVPSRFSGSGSGTDFTLTISSLQPEDFATYYCQQFNDYFTFGPGTKVDIKR

SEQ ID NO: 538 - protein, 107 aa, synthetic construct
  source 1..107: note = VL24
AIQLTQSPSSLSASVGDRVTITCRASQGISSALVWYQQKPGKAPKLLIYDASSYESGVPSRFSGSGSGTDFTLTISSLQPEDFATYYCQQFNDYFTFGPGTKVDIKR

SEQ ID NO: 539 - protein, 107 aa, synthetic construct
  source 1..107: note = VL25
AIQLTQSPSSLSASVGDRVTITCRASQGISSALVWYQQKPGKAPKLLIYDASSLRSGVPSRFSGSGSGTDFTLTISSLQPEDFATYYCQQFNDYFTFGPGTKVDIKR

SEQ ID NO: 540 - protein, 107 aa, synthetic construct
  source 1..107: note = VL26
AIQLTQSPSSLSASVGDRVTITCRASQGISSALVWYQQKPGKAPKLLIYDASSLYSGVPSRFSGSGSGTDFTLTISSLQPEDFATYYCQQFNDYFTFGPGTKVDIKR

SEQ ID NO: 541 - protein, 107 aa, synthetic construct
  source 1..107: note = VL27
AIQLTQSPSSLSASVGDRVTITCRASQGISSALVWYQQKPGKAPKLLIYDASSLESGVPSRFSGSGEGTDFTLTISSLQPEDFATYYCQQFNDYFTFGPGTKVDIKR

SEQ ID NO: 542 - protein, 107 aa, synthetic construct
  source 1..107: note = VL28
AIQLTQSPSSLSASVGDRVTITCRASQGISSALVWYQQKPGKAPKLLIYDASSLESGVPSRFSGSGRGTDFTLTISSLQPEDFATYYCQQFNDYFTFGPGTKVDIKR

SEQ ID NO: 543 - protein, 107 aa, synthetic construct
  source 1..107: note = VL29
AIQLTQSPSSLSASVGDRVTITCRASQGISSALVWYQQKPGKAPKLLIYDASSLESGVPSRFSGSGYGTDFTLTISSLQPEDFATYYCQQFNDYFTFGPGTKVDIKR

SEQ ID NO: 544 - protein, 107 aa, synthetic construct
  source 1..107: note = VL30
AIQLTQSPSSLSASVGDRVTITCRASQGISSALVWYQQKPGKAPKLLIYDASSLESGVPSRFSGSGSGRDFTLTISSLQPEDFATYYCQQFNDYFTFGPGTKVDIKR

SEQ ID NO: 545 - protein, 107 aa, synthetic construct
  source 1..107: note = VL31
AIQLTQSPSSLSASVGDRVTITCRASQGISSALVWYQQKPGKAPKLLIYDASSLESGVPSRFSGSGSGYDFTLTISSLQPEDFATYYCQQFNDYFTFGPGTKVDIKR

SEQ ID NO: 546 - protein, 107 aa, synthetic construct
  source 1..107: note = VL32
AIQLTQSPSSLSASVGDRVTITCRASQGISSALVWYQQKPGKAPKLLIYDASSLESGVPSRFSGSGSGTDFTLTISSLQPEDFATYYCQQENDYFTFGPGTKVDIKR

SEQ ID NO: 547 - protein, 107 aa, synthetic construct; identical to SEQ ID NO: 352
  source 1..107: note = VL33

SEQ ID NO: 548 - protein, 107 aa, synthetic construct; identical to SEQ ID NO: 323
  source 1..107: note = VL34

SEQ ID NO: 549 - protein, 107 aa, synthetic construct; identical to SEQ ID NO: 325
  source 1..107: note = VL35

SEQ ID NO: 550 - protein, 107 aa, synthetic construct; identical to SEQ ID NO: 353
  source 1..107: note = VL36

SEQ ID NO: 551 - protein, 107 aa, synthetic construct
  source 1..107: note = VL37
AIQLTQSPSSLSASVGDRVTITCRASQGISSALVWYQQKPGKAPKLLIYDASSLESGVPSRFSGSGSGTDFTLTISSLQPEDFATYYCQQFRDYFTFGPGTKVDIKR

SEQ ID NO: 552 - protein, 107 aa, synthetic construct; identical to SEQ ID NO: 329
  source 1..107: note = VL38

SEQ ID NO: 553 - protein, 107 aa, synthetic construct; identical to SEQ ID NO: 331
  source 1..107: note = VL39

SEQ ID NO: 554 - protein, 107 aa, synthetic construct; identical to SEQ ID NO: 356
  source 1..107: note = VL40

SEQ ID NO: 555 - protein, 107 aa, synthetic construct; identical to SEQ ID NO: 357
  source 1..107: note = VL41

SEQ ID NO: 556 - protein, 107 aa, synthetic construct; identical to SEQ ID NO: 341
  source 1..107: note = VL42

SEQ ID NO: 557 - protein, 107 aa, synthetic construct
  source 1..107: note = VL43
AIQLTQSPSSLSASVGDRVTITCRASQGISSALVWYQQKPGKAPKLLIYDASSLESGVPSRFSGSGSGTDFTLTISSLQPEDFATYYCQQFNDRFTFGPGTKVDIKR

SEQ ID NO: 558 - protein, 447 aa, synthetic construct
  source 1..447: note = HC02
QVQLVQSGAEVKKPGASVKVSCKASGYYFTNHYMHWVRQAPGQGLEWMGIINPISGSTSNAQKFQGRVTMTRDTSTSTVYMELSSLRSEDTAVYYCARDIVDAFDFWGQGTMVTVSSASTKGPSVFPLAPSSKSTSGGTAALGCLVKDYFPEPVTVSWNSGALTSGVHTFPAVLQSSGLYSLSSVVTVPSSSLGTQTYICNVNHKPSNTKVDKKVEPKSCDKTHTCPPCPAPELLGGPSVFLFPPKPKDTLMISRTPEVTCVVVDVSHEDPEVKFNWYVDGVEVHNAKTKPREEQYNSTYRVVSVLTVLHQDWLNGKEYKCKVSNKALPAPIEKTISKAKGQPREPQVYTLPPSRDELTKNQVSLTCLVKGFYPSDIAVEWESNGQPENNYKTTPPVLDSDGSFFLYSKLTVDKSRWQQGNVFSCSVMHEALHNHYTQKSLSLSPGK

SEQ ID NO: 559 - protein, 447 aa, synthetic construct
  source 1..447: note = HC03
QVQLVQSGAEVKKPGASVKVSCKASGYTFKNHYMHWVRQAPGQGLEWMGIINPISGSTSNAQKFQGRVTMTRDTSTSTVYMELSSLRSEDTAVYYCARDIVDAFDFWGQGTMVTVSSASTKGPSVFPLAPSSKSTSGGTAALGCLVKDYFPEPVTVSWNSGALTSGVHTFPAVLQSSGLYSLSSVVTVPSSSLGTQTYICNVNHKPSNTKVDKKVEPKSCDKTHTCPPCPAPELLGGPSVFLFPPKPKDTLMISRTPEVTCVVVDVSHEDPEVKFNWYVDGVEVHNAKTKPREEQYNSTYRVVSVLTVLHQDWLNGKEYKCKVSNKALPAPIEKTISKAKGQPREPQVYTLPPSRDELTKNQVSLTCLVKGFYPSDIAVEWESNGQPENNYKTTPPVLDSDGSFFLYSKLTVDKSRWQQGNVFSCSVMHEALHNHYTQKSLSLSPGK

SEQ ID NO: 560 - protein, 447 aa, synthetic construct
  source 1..447: note = HC04
QVQLVQSGAEVKKPGASVKVSCKASGYTFTNKYMHWVRQAPGQGLEWMGIINPISGSTSNAQKFQGRVTMTRDTSTSTVYMELSSLRSEDTAVYYCARDIVDAFDFWGQGTMVTVSSASTKGPSVFPLAPSSKSTSGGTAALGCLVKDYFPEPVTVSWNSGALTSGVHTFPAVLQSSGLYSLSSVVTVPSSSLGTQTYICNVNHKPSNTKVDKKVEPKSCDKTHTCPPCPAPELLGGPSVFLFPPKPKDTLMISRTPEVTCVVVDVSHEDPEVKFNWYVDGVEVHNAKTKPREEQYNSTYRVVSVLTVLHQDWLNGKEYKCKVSNKALPAPIEKTISKAKGQPREPQVYTLPPSRDELTKNQVSLTCLVKGFYPSDIAVEWESNGQPENNYKTTPPVLDSDGSFFLYSKLTVDKSRWQQGNVFSCSVMHEALHNHYTQKSLSLSPGK

SEQ ID NO: 561 - protein, 447 aa, synthetic construct
  source 1..447: note = HC05
QVQLVQSGAEVKKPGASVKVSCKASGYTFTNYYMHWVRQAPGQGLEWMGIINPISGSTSNAQKFQGRVTMTRDTSTSTVYMELSSLRSEDTAVYYCARDIVDAFDFWGQGTMVTVSSASTKGPSVFPLAPSSKSTSGGTAALGCLVKDYFPEPVTVSWNSGALTSGVHTFPAVLQSSGLYSLSSVVTVPSSSLGTQTYICNVNHKPSNTKVDKKVEPKSCDKTHTCPPCPAPELLGGPSVFLFPPKPKDTLMISRTPEVTCVVVDVSHEDPEVKFNWYVDGVEVHNAKTKPREEQYNSTYRVVSVLTVLHQDWLNGKEYKCKVSNKALPAPIEKTISKAKGQPREPQVYTLPPSRDELTKNQVSLTCLVKGFYPSDIAVEWESNGQPENNYKTTPPVLDSDGSFFLYSKLTVDKSRWQQGNVFSCSVMHEALHNHYTQKSLSLSPGK

SEQ ID NO: 562 - protein, 447 aa, synthetic construct
  source 1..447: note = HC06
QVQLVQSGAEVKKPGASVKVSCKASGYTFTNHDMHWVRQAPGQGLEWMGIINPISGSTSNAQKFQGRVTMTRDTSTSTVYMELSSLRSEDTAVYYCARDIVDAFDFWGQGTMVTVSSASTKGPSVFPLAPSSKSTSGGTAALGCLVKDYFPEPVTVSWNSGALTSGVHTFPAVLQSSGLYSLSSVVTVPSSSLGTQTYICNVNHKPSNTKVDKKVEPKSCDKTHTCPPCPAPELLGGPSVFLFPPKPKDTLMISRTPEVTCVVVDVSHEDPEVKFNWYVDGVEVHNAKTKPREEQYNSTYRVVSVLTVLHQDWLNGKEYKCKVSNKALPAPIEKTISKAKGQPREPQVYTLPPSRDELTKNQVSLTCLVKGFYPSDIAVEWESNGQPENNYKTTPPVLDSDGSFFLYSKLTVDKSRWQQGNVFSCSVMHEALHNHYTQKSLSLSPGK

SEQ ID NO: 563 - protein, 447 aa, synthetic construct
  source 1..447: note = HC07
QVQLVQSGAEVKKPGASVKVSCKASGYTFTNHLMHWVRQAPGQGLEWMGIINPISGSTSNAQKFQGRVTMTRDTSTSTVYMELSSLRSEDTAVYYCARDIVDAFDFWGQGTMVTVSSASTKGPSVFPLAPSSKSTSGGTAALGCLVKDYFPEPVTVSWNSGALTSGVHTFPAVLQSSGLYSLSSVVTVPSSSLGTQTYICNVNHKPSNTKVDKKVEPKSCDKTHTCPPCPAPELLGGPSVFLFPPKPKDTLMISRTPEVTCVVVDVSHEDPEVKFNWYVDGVEVHNAKTKPREEQYNSTYRVVSVLTVLHQDWLNGKEYKCKVSNKALPAPIEKTISKAKGQPREPQVYTLPPSRDELTKNQVSLTCLVKGFYPSDIAVEWESNGQPENNYKTTPPVLDSDGSFFLYSKLTVDKSRWQQGNVFSCSVMHEALHNHYTQKSLSLSPGK

SEQ ID NO: 564 - protein, 447 aa, synthetic construct
  source 1..447: note = HC08
QVQLVQSGAEVKKPGASVKVSCKASGYTFTNHRMHWVRQAPGQGLEWMGIINPISGSTSNAQKFQGRVTMTRDTSTSTVYMELSSLRSEDTAVYYCARDIVDAFDFWGQGTMVTVSSASTKGPSVFPLAPSSKSTSGGTAALGCLVKDYFPEPVTVSWNSGALTSGVHTFPAVLQSSGLYSLSSVVTVPSSSLGTQTYICNVNHKPSNTKVDKKVEPKSCDKTHTCPPCPAPELLGGPSVFLFPPKPKDTLMISRTPEVTCVVVDVSHEDPEVKFNWYVDGVEVHNAKTKPREEQYNSTYRVVSVLTVLHQDWLNGKEYKCKVSNKALPAPIEKTISKAKGQPREPQVYTLPPSRDELTKNQVSLTCLVKGFYPSDIAVEWESNGQPENNYKTTPPVLDSDGSFFLYSKLTVDKSRWQQGNVFSCSVMHEALHNHYTQKSLSLSPGK

SEQ ID NO: 565 - protein, 447 aa, synthetic construct
  source 1..447: note = HC09
QVQLVQSGAEVKKPGASVKVSCKASGYTFTNHYMHWVRQAPGQGLEWMGIIEPISGSTSNAQKFQGRVTMTRDTSTSTVYMELSSLRSEDTAVYYCARDIVDAFDFWGQGTMVTVSSASTKGPSVFPLAPSSKSTSGGTAALGCLVKDYFPEPVTVSWNSGALTSGVHTFPAVLQSSGLYSLSSVVTVPSSSLGTQTYICNVNHKPSNTKVDKKVEPKSCDKTHTCPPCPAPELLGGPSVFLFPPKPKDTLMISRTPEVTCVVVDVSHEDPEVKFNWYVDGVEVHNAKTKPREEQYNSTYRVVSVLTVLHQDWLNGKEYKCKVSNKALPAPIEKTISKAKGQPREPQVYTLPPSRDELTKNQVSLTCLVKGFYPSDIAVEWESNGQPENNYKTTPPVLDSDGSFFLYSKLTVDKSRWQQGNVFSCSVMHEALHNHYTQKSLSLSPGK

SEQ ID NO: 566 - protein, 447 aa, synthetic construct
  source 1..447: note = HC10
QVQLVQSGAEVKKPGASVKVSCKASGYTFTNHYMHWVRQAPGQGLEWMGIIQPISGSTSNAQKFQGRVTMTRDTSTSTVYMELSSLRSEDTAVYYCARDIVDAFDFWGQGTMVTVSSASTKGPSVFPLAPSSKSTSGGTAALGCLVKDYFPEPVTVSWNSGALTSGVHTFPAVLQSSGLYSLSSVVTVPSSSLGTQTYICNVNHKPSNTKVDKKVEPKSCDKTHTCPPCPAPELLGGPSVFLFPPKPKDTLMISRTPEVTCVVVDVSHEDPEVKFNWYVDGVEVHNAKTKPREEQYNSTYRVVSVLTVLHQDWLNGKEYKCKVSNKALPAPIEKTISKAKGQPREPQVYTLPPSRDELTKNQVSLTCLVKGFYPSDIAVEWESNGQPENNYKTTPPVLDSDGSFFLYSKLTVDKSRWQQGNVFSCSVMHEALHNHYTQKSLSLSPGK

SEQ ID NO: 567 - protein, 447 aa, synthetic construct
  source 1..447: note = HC11
QVQLVQSGAEVKKPGASVKVSCKASGYTFTNHYMHWVRQAPGQGLEWMGIIRPISGSTSNAQKFQGRVTMTRDTSTSTVYMELSSLRSEDTAVYYCARDIVDAFDFWGQGTMVTVSSASTKGPSVFPLAPSSKSTSGGTAALGCLVKDYFPEPVTVSWNSGALTSGVHTFPAVLQSSGLYSLSSVVTVPSSSLGTQTYICNVNHKPSNTKVDKKVEPKSCDKTHTCPPCPAPELLGGPSVFLFPPKPKDTLMISRTPEVTCVVVDVSHEDPEVKFNWYVDGVEVHNAKTKPREEQYNSTYRVVSVLTVLHQDWLNGKEYKCKVSNKALPAPIEKTISKAKGQPREPQVYTLPPSRDELTKNQVSLTCLVKGFYPSDIAVEWESNGQPENNYKTTPPVLDSDGSFFLYSKLTVDKSRWQQGNVFSCSVMHEALHNHYTQKSLSLSPGK

SEQ ID NO: 568 - protein, 447 aa, synthetic construct
  source 1..447: note = HC12
QVQLVQSGAEVKKPGASVKVSCKASGYTFTNHYMHWVRQAPGQGLEWMGIINPIEGSTSNAQKFQGRVTMTRDTSTSTVYMELSSLRSEDTAVYYCARDIVDAFDFWGQGTMVTVSSASTKGPSVFPLAPSSKSTSGGTAALGCLVKDYFPEPVTVSWNSGALTSGVHTFPAVLQSSGLYSLSSVVTVPSSSLGTQTYICNVNHKPSNTKVDKKVEPKSCDKTHTCPPCPAPELLGGPSVFLFPPKPKDTLMISRTPEVTCVVVDVSHEDPEVKFNWYVDGVEVHNAKTKPREEQYNSTYRVVSVLTVLHQDWLNGKEYKCKVSNKALPAPIEKTISKAKGQPREPQVYTLPPSRDELTKNQVSLTCLVKGFYPSDIAVEWESNGQPENNYKTTPPVLDSDGSFFLYSKLTVDKSRWQQGNVFSCSVMHEALHNHYTQKSLSLSPGK

SEQ ID NO: 569 - protein, 447 aa, synthetic construct
  source 1..447: note = HC13
QVQLVQSGAEVKKPGASVKVSCKASGYTFTNHYMHWVRQAPGQGLEWMGIINPIFGSTSNAQKFQGRVTMTRDTSTSTVYMELSSLRSEDTAVYYCARDIVDAFDFWGQGTMVTVSSASTKGPSVFPLAPSSKSTSGGTAALGCLVKDYFPEPVTVSWNSGALTSGVHTFPAVLQSSGLYSLSSVVTVPSSSLGTQTYICNVNHKPSNTKVDKKVEPKSCDKTHTCPPCPAPELLGGPSVFLFPPKPKDTLMISRTPEVTCVVVDVSHEDPEVKFNWYVDGVEVHNAKTKPREEQYNSTYRVVSVLTVLHQDWLNGKEYKCKVSNKALPAPIEKTISKAKGQPREPQVYTLPPSRDELTKNQVSLTCLVKGFYPSDIAVEWESNGQPENNYKTTPPVLDSDGSFFLYSKLTVDKSRWQQGNVFSCSVMHEALHNHYTQKSLSLSPGK

SEQ ID NO: 570 - protein, 447 aa, synthetic construct
  source 1..447: note = HC14
QVQLVQSGAEVKKPGASVKVSCKASGYTFTNHYMHWVRQAPGQGLEWMGIINPIIGSTSNAQKFQGRVTMTRDTSTSTVYMELSSLRSEDTAVYYCARDIVDAFDFWGQGTMVTVSSASTKGPSVFPLAPSSKSTSGGTAALGCLVKDYFPEPVTVSWNSGALTSGVHTFPAVLQSSGLYSLSSVVTVPSSSLGTQTYICNVNHKPSNTKVDKKVEPKSCDKTHTCPPCPAPELLGGPSVFLFPPKPKDTLMISRTPEVTCVVVDVSHEDPEVKFNWYVDGVEVHNAKTKPREEQYNSTYRVVSVLTVLHQDWLNGKEYKCKVSNKALPAPIEKTISKAKGQPREPQVYTLPPSRDELTKNQVSLTCLVKGFYPSDIAVEWESNGQPENNYKTTPPVLDSDGSFFLYSKLTVDKSRWQQGNVFSCSVMHEALHNHYTQKSLSLSPGK

SEQ ID NO: 571 - protein, 447 aa, synthetic construct
  source 1..447: note = HC15
QVQLVQSGAEVKKPGASVKVSCKASGYTFTNHYMHWVRQAPGQGLEWMGIINPIQGSTSNAQKFQGRVTMTRDTSTSTVYMELSSLRSEDTAVYYCARDIVDAFDFWGQGTMVTVSSASTKGPSVFPLAPSSKSTSGGTAALGCLVKDYFPEPVTVSWNSGALTSGVHTFPAVLQSSGLYSLSSVVTVPSSSLGTQTYICNVNHKPSNTKVDKKVEPKSCDKTHTCPPCPAPELLGGPSVFLFPPKPKDTLMISRTPEVTCVVVDVSHEDPEVKFNWYVDGVEVHNAKTKPREEQYNSTYRVVSVLTVLHQDWLNGKEYKCKVSNKALPAPIEKTISKAKGQPREPQVYTLPPSRDELTKNQVSLTCLVKGFYPSDIAVEWESNGQPENNYKTTPPVLDSDGSFFLYSKLTVDKSRWQQGNVFSCSVMHEALHNHYTQKSLSLSPGK

SEQ ID NO: 572 - protein, 447 aa, synthetic construct
  source 1..447: note = HC16
QVQLVQSGAEVKKPGASVKVSCKASGYTFTNHYMHWVRQAPGQGLEWMGIINPIRGSTSNAQKFQGRVTMTRDTSTSTVYMELSSLRSEDTAVYYCARDIVDAFDFWGQGTMVTVSSASTKGPSVFPLAPSSKSTSGGTAALGCLVKDYFPEPVTVSWNSGALTSGVHTFPAVLQSSGLYSLSSVVTVPSSSLGTQTYICNVNHKPSNTKVDKKVEPKSCDKTHTCPPCPAPELLGGPSVFLFPPKPKDTLMISRTPEVTCVVVDVSHEDPEVKFNWYVDGVEVHNAKTKPREEQYNSTYRVVSVLTVLHQDWLNGKEYKCKVSNKALPAPIEKTISKAKGQPREPQVYTLPPSRDELTKNQVSLTCLVKGFYPSDIAVEWESNGQPENNYKTTPPVLDSDGSFFLYSKLTVDKSRWQQGNVFSCSVMHEALHNHYTQKSLSLSPGK

SEQ ID NO: 573 - protein, 447 aa, synthetic construct
  source 1..447: note = HC17
QVQLVQSGAEVKKPGASVKVSCKASGYTFTNHYMHWVRQAPGQGLEWMGIINPIYGSTSNAQKFQGRVTMTRDTSTSTVYMELSSLRSEDTAVYYCARDIVDAFDFWGQGTMVTVSSASTKGPSVFPLAPSSKSTSGGTAALGCLVKDYFPEPVTVSWNSGALTSGVHTFPAVLQSSGLYSLSSVVTVPSSSLGTQTYICNVNHKPSNTKVDKKVEPKSCDKTHTCPPCPAPELLGGPSVFLFPPKPKDTLMISRTPEVTCVVVDVSHEDPEVKFNWYVDGVEVHNAKTKPREEQYNSTYRVVSVLTVLHQDWLNGKEYKCKVSNKALPAPIEKTISKAKGQPREPQVYTLPPSRDELTKNQVSLTCLVKGFYPSDIAVEWESNGQPENNYKTTPPVLDSDGSFFLYSKLTVDKSRWQQGNVFSCSVMHEALHNHYTQKSLSLSPGK

SEQ ID NO: 574 - protein, 447 aa, synthetic construct
  source 1..447: note = HC18
QVQLVQSGAEVKKPGASVKVSCKASGYTFTNHYMHWVRQAPGQGLEWMGIINPISGETSNAQKFQGRVTMTRDTSTSTVYMELSSLRSEDTAVYYCARDIVDAFDFWGQGTMVTVSSASTKGPSVFPLAPSSKSTSGGTAALGCLVKDYFPEPVTVSWNSGALTSGVHTFPAVLQSSGLYSLSSVVTVPSSSLGTQTYICNVNHKPSNTKVDKKVEPKSCDKTHTCPPCPAPELLGGPSVFLFPPKPKDTLMISRTPEVTCVVVDVSHEDPEVKFNWYVDGVEVHNAKTKPREEQYNSTYRVVSVLTVLHQDWLNGKEYKCKVSNKALPAPIEKTISKAKGQPREPQVYTLPPSRDELTKNQVSLTCLVKGFYPSDIAVEWESNGQPENNYKTTPPVLDSDGSFFLYSKLTVDKSRWQQGNVFSCSVMHEALHNHYTQKSLSLSPGK

SEQ ID NO: 575 - protein, 447 aa, synthetic construct
  source 1..447: note = HC19
QVQLVQSGAEVKKPGASVKVSCKASGYTFTNHYMHWVRQAPGQGLEWMGIINPISGFTSNAQKFQGRVTMTRDTSTSTVYMELSSLRSEDTAVYYCARDIVDAFDFWGQGTMVTVSSASTKGPSVFPLAPSSKSTSGGTAALGCLVKDYFPEPVTVSWNSGALTSGVHTFPAVLQSSGLYSLSSVVTVPSSSLGTQTYICNVNHKPSNTKVDKKVEPKSCDKTHTCPPCPAPELLGGPSVFLFPPKPKDTLMISRTPEVTCVVVDVSHEDPEVKFNWYVDGVEVHNAKTKPREEQYNSTYRVVSVLTVLHQDWLNGKEYKCKVSNKALPAPIEKTISKAKGQPREPQVYTLPPSRDELTKNQVSLTCLVKGFYPSDIAVEWESNGQPENNYKTTPPVLDSDGSFFLYSKLTVDKSRWQQGNVFSCSVMHEALHNHYTQKSLSLSPGK

SEQ ID NO: 576 - protein, 447 aa, synthetic construct
  source 1..447: note = HC20
QVQLVQSGAEVKKPGASVKVSCKASGYTFTNHYMHWVRQAPGQGLEWMGIINPISGRTSNAQKFQGRVTMTRDTSTSTVYMELSSLRSEDTAVYYCARDIVDAFDFWGQGTMVTVSSASTKGPSVFPLAPSSKSTSGGTAALGCLVKDYFPEPVTVSWNSGALTSGVHTFPAVLQSSGLYSLSSVVTVPSSSLGTQTYICNVNHKPSNTKVDKKVEPKSCDKTHTCPPCPAPELLGGPSVFLFPPKPKDTLMISRTPEVTCVVVDVSHEDPEVKFNWYVDGVEVHNAKTKPREEQYNSTYRVVSVLTVLHQDWLNGKEYKCKVSNKALPAPIEKTISKAKGQPREPQVYTLPPSRDELTKNQVSLTCLVKGFYPSDIAVEWESNGQPENNYKTTPPVLDSDGSFFLYSKLTVDKSRWQQGNVFSCSVMHEALHNHYTQKSLSLSPGK

SEQ ID NO: 577 - protein, 447 aa, synthetic construct
  source 1..447: note = HC21
QVQLVQSGAEVKKPGASVKVSCKASGYTFTNHYMHWVRQAPGQGLEWMGIINPISGYTSNAQKFQGRVTMTRDTSTSTVYMELSSLRSEDTAVYYCARDIVDAFDFWGQGTMVTVSSASTKGPSVFPLAPSSKSTSGGTAALGCLVKDYFPEPVTVSWNSGALTSGVHTFPAVLQSSGLYSLSSVVTVPSSSLGTQTYICNVNHKPSNTKVDKKVEPKSCDKTHTCPPCPAPELLGGPSVFLFPPKPKDTLMISRTPEVTCVVVDVSHEDPEVKFNWYVDGVEVHNAKTKPREEQYNSTYRVVSVLTVLHQDWLNGKEYKCKVSNKALPAPIEKTISKAKGQPREPQVYTLPPSRDELTKNQVSLTCLVKGFYPSDIAVEWESNGQPENNYKTTPPVLDSDGSFFLYSKLTVDKSRWQQGNVFSCSVMHEALHNHYTQKSLSLSPGK

SEQ ID NO: 578 - protein, 447 aa, synthetic construct
  source 1..447: note = HC22
QVQLVQSGAEVKKPGASVKVSCKASGYTFTNHYMHWVRQAPGQGLEWMGIINPISGSFSNAQKFQGRVTMTRDTSTSTVYMELSSLRSEDTAVYYCARDIVDAFDFWGQGTMVTVSSASTKGPSVFPLAPSSKSTSGGTAALGCLVKDYFPEPVTVSWNSGALTSGVHTFPAVLQSSGLYSLSSVVTVPSSSLGTQTYICNVNHKPSNTKVDKKVEPKSCDKTHTCPPCPAPELLGGPSVFLFPPKPKDTLMISRTPEVTCVVVDVSHEDPEVKFNWYVDGVEVHNAKTKPREEQYNSTYRVVSVLTVLHQDWLNGKEYKCKVSNKALPAPIEKTISKAKGQPREPQVYTLPPSRDELTKNQVSLTCLVKGFYPSDIAVEWESNGQPENNYKTTPPVLDSDGSFFLYSKLTVDKSRWQQGNVFSCSVMHEALHNHYTQKSLSLSPGK

SEQ ID NO: 579 - protein, 447 aa, synthetic construct
  source 1..447: note = HC23
QVQLVQSGAEVKKPGASVKVSCKASGYTFTNHYMHWVRQAPGQGLEWMGIINPISGSRSNAQKFQGRVTMTRDTSTSTVYMELSSLRSEDTAVYYCARDIVDAFDFWGQGTMVTVSSASTKGPSVFPLAPSSKSTSGGTAALGCLVKDYFPEPVTVSWNSGALTSGVHTFPAVLQSSGLYSLSSVVTVPSSSLGTQTYICNVNHKPSNTKVDKKVEPKSCDKTHTCPPCPAPELLGGPSVFLFPPKPKDTLMISRTPEVTCVVVDVSHEDPEVKFNWYVDGVEVHNAKTKPREEQYNSTYRVVSVLTVLHQDWLNGKEYKCKVSNKALPAPIEKTISKAKGQPREPQVYTLPPSRDELTKNQVSLTCLVKGFYPSDIAVEWESNGQPENNYKTTPPVLDSDGSFFLYSKLTVDKSRWQQGNVFSCSVMHEALHNHYTQKSLSLSPGK

SEQ ID NO: 580 - protein, 447 aa, synthetic construct
  source 1..447: note = HC24
QVQLVQSGAEVKKPGASVKVSCKASGYTFTNHYMHWVRQAPGQGLEWMGIINPISGSTFNAQKFQGRVTMTRDTSTSTVYMELSSLRSEDTAVYYCARDIVDAFDFWGQGTMVTVSSASTKGPSVFPLAPSSKSTSGGTAALGCLVKDYFPEPVTVSWNSGALTSGVHTFPAVLQSSGLYSLSSVVTVPSSSLGTQTYICNVNHKPSNTKVDKKVEPKSCDKTHTCPPCPAPELLGGPSVFLFPPKPKDTLMISRTPEVTCVVVDVSHEDPEVKFNWYVDGVEVHNAKTKPREEQYNSTYRVVSVLTVLHQDWLNGKEYKCKVSNKALPAPIEKTISKAKGQPREPQVYTLPPSRDELTKNQVSLTCLVKGFYPSDIAVEWESNGQPENNYKTTPPVLDSDGSFFLYSKLTVDKSRWQQGNVFSCSVMHEALHNHYTQKSLSLSPGK

SEQ ID NO: 581 - protein, 447 aa, synthetic construct
  source 1..447: note = HC25
QVQLVQSGAEVKKPGASVKVSCKASGYTFTNHYMHWVRQAPGQGLEWMGIINPISGSTRNAQKFQGRVTMTRDTSTSTVYMELSSLRSEDTAVYYCARDIVDAFDFWGQGTMVTVSSASTKGPSVFPLAPSSKSTSGGTAALGCLVKDYFPEPVTVSWNSGALTSGVHTFPAVLQSSGLYSLSSVVTVPSSSLGTQTYICNVNHKPSNTKVDKKVEPKSCDKTHTCPPCPAPELLGGPSVFLFPPKPKDTLMISRTPEVTCVVVDVSHEDPEVKFNWYVDGVEVHNAKTKPREEQYNSTYRVVSVLTVLHQDWLNGKEYKCKVSNKALPAPIEKTISKAKGQPREPQVYTLPPSRDELTKNQVSLTCLVKGFYPSDIAVEWESNGQPENNYKTTPPVLDSDGSFFLYSKLTVDKSRWQQGNVFSCSVMHEALHNHYTQKSLSLSPGK

SEQ ID NO: 582 - protein, 447 aa, synthetic construct
  source 1..447: note = HC26
QVQLVQSGAEVKKPGASVKVSCKASGYTFTNHYMHWVRQAPGQGLEWMGIINPISGSTYNAQKFQGRVTMTRDTSTSTVYMELSSLRSEDTAVYYCARDIVDAFDFWGQGTMVTVSSASTKGPSVFPLAPSSKSTSGGTAALGCLVKDYFPEPVTVSWNSGALTSGVHTFPAVLQSSGLYSLSSVVTVPSSSLGTQTYICNVNHKPSNTKVDKKVEPKSCDKTHTCPPCPAPELLGGPSVFLFPPKPKDTLMISRTPEVTCVVVDVSHEDPEVKFNWYVDGVEVHNAKTKPREEQYNSTYRVVSVLTVLHQDWLNGKEYKCKVSNKALPAPIEKTISKAKGQPREPQVYTLPPSRDELTKNQVSLTCLVKGFYPSDIAVEWESNGQPENNYKTTPPVLDSDGSFFLYSKLTVDKSRWQQGNVFSCSVMHEALHNHYTQKSLSLSPGK

SEQ ID NO: 583 - protein, 447 aa, synthetic construct
  source 1..447: note = HC27
QVQLVQSGAEVKKPGASVKVSCKASGYTFTNHYMHWVRQAPGQGLEWMGIINPISGSTSEAQKFQGRVTMTRDTSTSTVYMELSSLRSEDTAVYYCARDIVDAFDFWGQGTMVTVSSASTKGPSVFPLAPSSKSTSGGTAALGCLVKDYFPEPVTVSWNSGALTSGVHTFPAVLQSSGLYSLSSVVTVPSSSLGTQTYICNVNHKPSNTKVDKKVEPKSCDKTHTCPPCPAPELLGGPSVFLFPPKPKDTLMISRTPEVTCVVVDVSHEDPEVKFNWYVDGVEVHNAKTKPREEQYNSTYRVVSVLTVLHQDWLNGKEYKCKVSNKALPAPIEKTISKAKGQPREPQVYTLPPSRDELTKNQVSLTCLVKGFYPSDIAVEWESNGQPENNYKTTPPVLDSDGSFFLYSKLTVDKSRWQQGNVFSCSVMHEALHNHYTQKSLSLSPGK

SEQ ID NO: 584 - protein, 447 aa, synthetic construct
  source 1..447: note = HC28
QVQLVQSGAEVKKPGASVKVSCKASGYTFTNHYMHWVRQAPGQGLEWMGIINPISGSTSRAQKFQGRVTMTRDTSTSTVYMELSSLRSEDTAVYYCARDIVDAFDFWGQGTMVTVSSASTKGPSVFPLAPSSKSTSGGTAALGCLVKDYFPEPVTVSWNSGALTSGVHTFPAVLQSSGLYSLSSVVTVPSSSLGTQTYICNVNHKPSNTKVDKKVEPKSCDKTHTCPPCPAPELLGGPSVFLFPPKPKDTLMISRTPEVTCVVVDVSHEDPEVKFNWYVDGVEVHNAKTKPREEQYNSTYRVVSVLTVLHQDWLNGKEYKCKVSNKALPAPIEKTISKAKGQPREPQVYTLPPSRDELTKNQVSLTCLVKGFYPSDIAVEWESNGQPENNYKTTPPVLDSDGSFFLYSKLTVDKSRWQQGNVFSCSVMHEALHNHYTQKSLSLSPGK

SEQ ID NO: 585 - protein, 447 aa, synthetic construct
  source 1..447: note = HC29
QVQLVQSGAEVKKPGASVKVSCKASGYTFTNHYMHWVRQAPGQGLEWMGIINPISGSTSYAQKFQGRVTMTRDTSTSTVYMELSSLRSEDTAVYYCARDIVDAFDFWGQGTMVTVSSASTKGPSVFPLAPSSKSTSGGTAALGCLVKDYFPEPVTVSWNSGALTSGVHTFPAVLQSSGLYSLSSVVTVPSSSLGTQTYICNVNHKPSNTKVDKKVEPKSCDKTHTCPPCPAPELLGGPSVFLFPPKPKDTLMISRTPEVTCVVVDVSHEDPEVKFNWYVDGVEVHNAKTKPREEQYNSTYRVVSVLTVLHQDWLNGKEYKCKVSNKALPAPIEKTISKAKGQPREPQVYTLPPSRDELTKNQVSLTCLVKGFYPSDIAVEWESNGQPENNYKTTPPVLDSDGSFFLYSKLTVDKSRWQQGNVFSCSVMHEALHNHYTQKSLSLSPGK

SEQ ID NO: 586 - protein, 447 aa, synthetic construct
  source 1..447: note = HC30
QVQLVQSGAEVKKPGASVKVSCKASGYTFTNHYMHWVRQAPGQGLEWMGIINPISGSTSNFQKFQGRVTMTRDTSTSTVYMELSSLRSEDTAVYYCARDIVDAFDFWGQGTMVTVSSASTKGPSVFPLAPSSKSTSGGTAALGCLVKDYFPEPVTVSWNSGALTSGVHTFPAVLQSSGLYSLSSVVTVPSSSLGTQTYICNVNHKPSNTKVDKKVEPKSCDKTHTCPPCPAPELLGGPSVFLFPPKPKDTLMISRTPEVTCVVVDVSHEDPEVKFNWYVDGVEVHNAKTKPREEQYNSTYRVVSVLTVLHQDWLNGKEYKCKVSNKALPAPIEKTISKAKGQPREPQVYTLPPSRDELTKNQVSLTCLVKGFYPSDIAVEWESNGQPENNYKTTPPVLDSDGSFFLYSKLTVDKSRWQQGNVFSCSVMHEALHNHYTQKSLSLSPGK

SEQ ID NO: 587 - protein, 447 aa, synthetic construct
  source 1..447: note = HC31
QVQLVQSGAEVKKPGASVKVSCKASGYTFTNHYMHWVRQAPGQGLEWMGIINPISGSTSNRQKFQGRVTMTRDTSTSTVYMELSSLRSEDTAVYYCARDIVDAFDFWGQGTMVTVSSASTKGPSVFPLAPSSKSTSGGTAALGCLVKDYFPEPVTVSWNSGALTSGVHTFPAVLQSSGLYSLSSVVTVPSSSLGTQTYICNVNHKPSNTKVDKKVEPKSCDKTHTCPPCPAPELLGGPSVFLFPPKPKDTLMISRTPEVTCVVVDVSHEDPEVKFNWYVDGVEVHNAKTKPREEQYNSTYRVVSVLTVLHQDWLNGKEYKCKVSNKALPAPIEKTISKAKGQPREPQVYTLPPSRDELTKNQVSLTCLVKGFYPSDIAVEWESNGQPENNYKTTPPVLDSDGSFFLYSKLTVDKSRWQQGNVFSCSVMHEALHNHYTQKSLSLSPGK

SEQ ID NO: 588 - protein, 447 aa, synthetic construct
  source 1..447: note = HC32
QVQLVQSGAEVKKPGASVKVSCKASGYTFTNHYMHWVRQAPGQGLEWMGIINPISGSTSNYQKFQGRVTMTRDTSTSTVYMELSSLRSEDTAVYYCARDIVDAFDFWGQGTMVTVSSASTKGPSVFPLAPSSKSTSGGTAALGCLVKDYFPEPVTVSWNSGALTSGVHTFPAVLQSSGLYSLSSVVTVPSSSLGTQTYICNVNHKPSNTKVDKKVEPKSCDKTHTCPPCPAPELLGGPSVFLFPPKPKDTLMISRTPEVTCVVVDVSHEDPEVKFNWYVDGVEVHNAKTKPREEQYNSTYRVVSVLTVLHQDWLNGKEYKCKVSNKALPAPIEKTISKAKGQPREPQVYTLPPSRDELTKNQVSLTCLVKGFYPSDIAVEWESNGQPENNYKTTPPVLDSDGSFFLYSKLTVDKSRWQQGNVFSCSVMHEALHNHYTQKSLSLSPGK

SEQ ID NO: 589 - protein, 447 aa, synthetic construct
  source 1..447: note = HC33
QVQLVQSGAEVKKPGASVKVSCKASGYTFTNHYMHWVRQAPGQGLEWMGIINPISGSTSNALKFQGRVTMTRDTSTSTVYMELSSLRSEDTAVYYCARDIVDAFDFWGQGTMVTVSSASTKGPSVFPLAPSSKSTSGGTAALGCLVKDYFPEPVTVSWNSGALTSGVHTFPAVLQSSGLYSLSSVVTVPSSSLGTQTYICNVNHKPSNTKVDKKVEPKSCDKTHTCPPCPAPELLGGPSVFLFPPKPKDTLMISRTPEVTCVVVDVSHEDPEVKFNWYVDGVEVHNAKTKPREEQYNSTYRVVSVLTVLHQDWLNGKEYKCKVSNKALPAPIEKTISKAKGQPREPQVYTLPPSRDELTKNQVSLTCLVKGFYPSDIAVEWESNGQPENNYKTTPPVLDSDGSFFLYSKLTVDKSRWQQGNVFSCSVMHEALHNHYTQKSLSLSPGK

SEQ ID NO: 590 - protein, 447 aa, synthetic construct
  source 1..447: note = HC34
QVQLVQSGAEVKKPGASVKVSCKASGYTFTNHYMHWVRQAPGQGLEWMGIINPISGSTSNARKFQGRVTMTRDTSTSTVYMELSSLRSEDTAVYYCARDIVDAFDFWGQGTMVTVSSASTKGPSVFPLAPSSKSTSGGTAALGCLVKDYFPEPVTVSWNSGALTSGVHTFPAVLQSSGLYSLSSVVTVPSSSLGTQTYICNVNHKPSNTKVDKKVEPKSCDKTHTCPPCPAPELLGGPSVFLFPPKPKDTLMISRTPEVTCVVVDVSHEDPEVKFNWYVDGVEVHNAKTKPREEQYNSTYRVVSVLTVLHQDWLNGKEYKCKVSNKALPAPIEKTISKAKGQPREPQVYTLPPSRDELTKNQVSLTCLVKGFYPSDIAVEWESNGQPENNYKTTPPVLDSDGSFFLYSKLTVDKSRWQQGNVFSCSVMHEALHNHYTQKSLSLSPGK

SEQ ID NO: 591 - protein, 447 aa, synthetic construct
  source 1..447: note = HC35
QVQLVQSGAEVKKPGASVKVSCKASGYTFTNHYMHWVRQAPGQGLEWMGIINPISGSTSNAYKFQGRVTMTRDTSTSTVYMELSSLRSEDTAVYYCARDIVDAFDFWGQGTMVTVSSASTKGPSVFPLAPSSKSTSGGTAALGCLVKDYFPEPVTVSWNSGALTSGVHTFPAVLQSSGLYSLSSVVTVPSSSLGTQTYICNVNHKPSNTKVDKKVEPKSCDKTHTCPPCPAPELLGGPSVFLFPPKPKDTLMISRTPEVTCVVVDVSHEDPEVKFNWYVDGVEVHNAKTKPREEQYNSTYRVVSVLTVLHQDWLNGKEYKCKVSNKALPAPIEKTISKAKGQPREPQVYTLPPSRDELTKNQVSLTCLVKGFYPSDIAVEWESNGQPENNYKTTPPVLDSDGSFFLYSKLTVDKSRWQQGNVFSCSVMHEALHNHYTQKSLSLSPGK

SEQ ID NO: 592 - protein, 447 aa, synthetic construct
  source 1..447: note = HC36
QVQLVQSGAEVKKPGASVKVSCKASGYTFTNHYMHWVRQAPGQGLEWMGIINPISGSTSNAQKFEGRVTMTRDTSTSTVYMELSSLRSEDTAVYYCARDIVDAFDFWGQGTMVTVSSASTKGPSVFPLAPSSKSTSGGTAALGCLVKDYFPEPVTVSWNSGALTSGVHTFPAVLQSSGLYSLSSVVTVPSSSLGTQTYICNVNHKPSNTKVDKKVEPKSCDKTHTCPPCPAPELLGGPSVFLFPPKPKDTLMISRTPEVTCVVVDVSHEDPEVKFNWYVDGVEVHNAKTKPREEQYNSTYRVVSVLTVLHQDWLNGKEYKCKVSNKALPAPIEKTISKAKGQPREPQVYTLPPSRDELTKNQVSLTCLVKGFYPSDIAVEWESNGQPENNYKTTPPVLDSDGSFFLYSKLTVDKSRWQQGNVFSCSVMHEALHNHYTQKSLSLSPGK

SEQ ID NO: 593 - protein, 447 aa, synthetic construct
  source 1..447: note = HC37
QVQLVQSGAEVKKPGASVKVSCKASGYTFTNHYMHWVRQAPGQGLEWMGIINPISGSTSNAQKFRGRVTMTRDTSTSTVYMELSSLRSEDTAVYYCARDIVDAFDFWGQGTMVTVSSASTKGPSVFPLAPSSKSTSGGTAALGCLVKDYFPEPVTVSWNSGALTSGVHTFPAVLQSSGLYSLSSVVTVPSSSLGTQTYICNVNHKPSNTKVDKKVEPKSCDKTHTCPPCPAPELLGGPSVFLFPPKPKDTLMISRTPEVTCVVVDVSHEDPEVKFNWYVDGVEVHNAKTKPREEQYNSTYRVVSVLTVLHQDWLNGKEYKCKVSNKALPAPIEKTISKAKGQPREPQVYTLPPSRDELTKNQVSLTCLVKGFYPSDIAVEWESNGQPENNYKTTPPVLDSDGSFFLYSKLTVDKSRWQQGNVFSCSVMHEALHNHYTQKSLSLSPGK

SEQ ID NO: 594 - protein, 447 aa, synthetic construct
  source 1..447: note = HC38
QVQLVQSGAEVKKPGASVKVSCKASGYTFTNHYMHWVRQAPGQGLEWMGIINPISGSTSNAQKFYGRVTMTRDTSTSTVYMELSSLRSEDTAVYYCARDIVDAFDFWGQGTMVTVSSASTKGPSVFPLAPSSKSTSGGTAALGCLVKDYFPEPVTVSWNSGALTSGVHTFPAVLQSSGLYSLSSVVTVPSSSLGTQTYICNVNHKPSNTKVDKKVEPKSCDKTHTCPPCPAPELLGGPSVFLFPPKPKDTLMISRTPEVTCVVVDVSHEDPEVKFNWYVDGVEVHNAKTKPREEQYNSTYRVVSVLTVLHQDWLNGKEYKCKVSNKALPAPIEKTISKAKGQPREPQVYTLPPSRDELTKNQVSLTCLVKGFYPSDIAVEWESNGQPENNYKTTPPVLDSDGSFFLYSKLTVDKSRWQQGNVFSCSVMHEALHNHYTQKSLSLSPGK

SEQ ID NO: 595 - protein, 447 aa, synthetic construct
  source 1..447: note = HC39
QVQLVQSGAEVKKPGASVKVSCKASGYTFTNHYMHWVRQAPGQGLEWMGIINPISGSTSNAQKFQGRVTMTRDTSTSTVYMELSSLRSEDTAVYYCARFIVDAFDFWGQGTMVTVSSASTKGPSVFPLAPSSKSTSGGTAALGCLVKDYFPEPVTVSWNSGALTSGVHTFPAVLQSSGLYSLSSVVTVPSSSLGTQTYICNVNHKPSNTKVDKKVEPKSCDKTHTCPPCPAPELLGGPSVFLFPPKPKDTLMISRTPEVTCVVVDVSHEDPEVKFNWYVDGVEVHNAKTKPREEQYNSTYRVVSVLTVLHQDWLNGKEYKCKVSNKALPAPIEKTISKAKGQPREPQVYTLPPSRDELTKNQVSLTCLVKGFYPSDIAVEWESNGQPENNYKTTPPVLDSDGSFFLYSKLTVDKSRWQQGNVFSCSVMHEALHNHYTQKSLSLSPGK

SEQ ID NO: 596 - protein, 447 aa, synthetic construct
  source 1..447: note = HC40
QVQLVQSGAEVKKPGASVKVSCKASGYTFTNHYMHWVRQAPGQGLEWMGIINPISGSTSNAQKFQGRVTMTRDTSTSTVYMELSSLRSEDTAVYYCARRIVDAFDFWGQGTMVTVSSASTKGPSVFPLAPSSKSTSGGTAALGCLVKDYFPEPVTVSWNSGALTSGVHTFPAVLQSSGLYSLSSVVTVPSSSLGTQTYICNVNHKPSNTKVDKKVEPKSCDKTHTCPPCPAPELLGGPSVFLFPPKPKDTLMISRTPEVTCVVVDVSHEDPEVKFNWYVDGVEVHNAKTKPREEQYNSTYRVVSVLTVLHQDWLNGKEYKCKVSNKALPAPIEKTISKAKGQPREPQVYTLPPSRDELTKNQVSLTCLVKGFYPSDIAVEWESNGQPENNYKTTPPVLDSDGSFFLYSKLTVDKSRWQQGNVFSCSVMHEALHNHYTQKSLSLSPGK

SEQ ID NO: 597 - protein, 447 aa, synthetic construct
  source 1..447: note = HC41
QVQLVQSGAEVKKPGASVKVSCKASGYTFTNHYMHWVRQAPGQGLEWMGIINPISGSTSNAQKFQGRVTMTRDTSTSTVYMELSSLRSEDTAVYYCARYIVDAFDFWGQGTMVTVSSASTKGPSVFPLAPSSKSTSGGTAALGCLVKDYFPEPVTVSWNSGALTSGVHTFPAVLQSSGLYSLSSVVTVPSSSLGTQTYICNVNHKPSNTKVDKKVEPKSCDKTHTCPPCPAPELLGGPSVFLFPPKPKDTLMISRTPEVTCVVVDVSHEDPEVKFNWYVDGVEVHNAKTKPREEQYNSTYRVVSVLTVLHQDWLNGKEYKCKVSNKALPAPIEKTISKAKGQPREPQVYTLPPSRDELTKNQVSLTCLVKGFYPSDIAVEWESNGQPENNYKTTPPVLDSDGSFFLYSKLTVDKSRWQQGNVFSCSVMHEALHNHYTQKSLSLSPGK

SEQ ID NO: 598 - protein, 447 aa, synthetic construct
  source 1..447: note = HC42
QVQLVQSGAEVKKPGASVKVSCKASGYTFTNHYMHWVRQAPGQGLEWMGIINPISGSTSNAQKFQGRVTMTRDTSTSTVYMELSSLRSEDTAVYYCARDEVDAFDFWGQGTMVTVSSASTKGPSVFPLAPSSKSTSGGTAALGCLVKDYFPEPVTVSWNSGALTSGVHTFPAVLQSSGLYSLSSVVTVPSSSLGTQTYICNVNHKPSNTKVDKKVEPKSCDKTHTCPPCPAPELLGGPSVFLFPPKPKDTLMISRTPEVTCVVVDVSHEDPEVKFNWYVDGVEVHNAKTKPREEQYNSTYRVVSVLTVLHQDWLNGKEYKCKVSNKALPAPIEKTISKAKGQPREPQVYTLPPSRDELTKNQVSLTCLVKGFYPSDIAVEWESNGQPENNYKTTPPVLDSDGSFFLYSKLTVDKSRWQQGNVFSCSVMHEALHNHYTQKSLSLSPGK

SEQ ID NO: 599 - protein, 447 aa, synthetic construct
  source 1..447: note = HC43
QVQLVQSGAEVKKPGASVKVSCKASGYTFTNHYMHWVRQAPGQGLEWMGIINPISGSTSNAQKFQGRVTMTRDTSTSTVYMELSSLRSEDTAVYYCARDFVDAFDFWGQGTMVTVSSASTKGPSVFPLAPSSKSTSGGTAALGCLVKDYFPEPVTVSWNSGALTSGVHTFPAVLQSSGLYSLSSVVTVPSSSLGTQTYICNVNHKPSNTKVDKKVEPKSCDKTHTCPPCPAPELLGGPSVFLFPPKPKDTLMISRTPEVTCVVVDVSHEDPEVKFNWYVDGVEVHNAKTKPREEQYNSTYRVVSVLTVLHQDWLNGKEYKCKVSNKALPAPIEKTISKAKGQPREPQVYTLPPSRDELTKNQVSLTCLVKGFYPSDIAVEWESNGQPENNYKTTPPVLDSDGSFFLYSKLTVDKSRWQQGNVFSCSVMHEALHNHYTQKSLSLSPGK

SEQ ID NO: 600 - protein, 447 aa, synthetic construct
  source 1..447: note = HC44
QVQLVQSGAEVKKPGASVKVSCKASGYTFTNHYMHWVRQAPGQGLEWMGIINPISGSTSNAQKFQGRVTMTRDTSTSTVYMELSSLRSEDTAVYYCARDYVDAFDFWGQGTMVTVSSASTKGPSVFPLAPSSKSTSGGTAALGCLVKDYFPEPVTVSWNSGALTSGVHTFPAVLQSSGLYSLSSVVTVPSSSLGTQTYICNVNHKPSNTKVDKKVEPKSCDKTHTCPPCPAPELLGGPSVFLFPPKPKDTLMISRTPEVTCVVVDVSHEDPEVKFNWYVDGVEVHNAKTKPREEQYNSTYRVVSVLTVLHQDWLNGKEYKCKVSNKALPAPIEKTISKAKGQPREPQVYTLPPSRDELTKNQVSLTCLVKGFYPSDIAVEWESNGQPENNYKTTPPVLDSDGSFFLYSKLTVDKSRWQQGNVFSCSVMHEALHNHYTQKSLSLSPGK

SEQ ID NO: 601 - protein, 447 aa, synthetic construct
  source 1..447: note = HC45
QVQLVQSGAEVKKPGASVKVSCKASGYTFTNHYMHWVRQAPGQGLEWMGIINPISGSTSNAQKFQGRVTMTRDTSTSTVYMELSSLRSEDTAVYYCARDIEDAFDFWGQGTMVTVSSASTKGPSVFPLAPSSKSTSGGTAALGCLVKDYFPEPVTVSWNSGALTSGVHTFPAVLQSSGLYSLSSVVTVPSSSLGTQTYICNVNHKPSNTKVDKKVEPKSCDKTHTCPPCPAPELLGGPSVFLFPPKPKDTLMISRTPEVTCVVVDVSHEDPEVKFNWYVDGVEVHNAKTKPREEQYNSTYRVVSVLTVLHQDWLNGKEYKCKVSNKALPAPIEKTISKAKGQPREPQVYTLPPSRDELTKNQVSLTCLVKGFYPSDIAVEWESNGQPENNYKTTPPVLDSDGSFFLYSKLTVDKSRWQQGNVFSCSVMHEALHNHYTQKSLSLSPGK

SEQ ID NO: 602 - protein, 447 aa, synthetic construct
  source 1..447: note = HC46
QVQLVQSGAEVKKPGASVKVSCKASGYTFTNHYMHWVRQAPGQGLEWMGIINPISGSTSNAQKFQGRVTMTRDTSTSTVYMELSSLRSEDTAVYYCARDIFDAFDFWGQGTMVTVSSASTKGPSVFPLAPSSKSTSGGTAALGCLVKDYFPEPVTVSWNSGALTSGVHTFPAVLQSSGLYSLSSVVTVPSSSLGTQTYICNVNHKPSNTKVDKKVEPKSCDKTHTCPPCPAPELLGGPSVFLFPPKPKDTLMISRTPEVTCVVVDVSHEDPEVKFNWYVDGVEVHNAKTKPREEQYNSTYRVVSVLTVLHQDWLNGKEYKCKVSNKALPAPIEKTISKAKGQPREPQVYTLPPSRDELTKNQVSLTCLVKGFYPSDIAVEWESNGQPENNYKTTPPVLDSDGSFFLYSKLTVDKSRWQQGNVFSCSVMHEALHNHYTQKSLSLSPGK

SEQ ID NO: 603 - protein, 447 aa, synthetic construct
  source 1..447: note = HC47
QVQLVQSGAEVKKPGASVKVSCKASGYTFTNHYMHWVRQAPGQGLEWMGIINPISGSTSNAQKFQGRVTMTRDTSTSTVYMELSSLRSEDTAVYYCARDILDAFDFWGQGTMVTVSSASTKGPSVFPLAPSSKSTSGGTAALGCLVKDYFPEPVTVSWNSGALTSGVHTFPAVLQSSGLYSLSSVVTVPSSSLGTQTYICNVNHKPSNTKVDKKVEPKSCDKTHTCPPCPAPELLGGPSVFLFPPKPKDTLMISRTPEVTCVVVDVSHEDPEVKFNWYVDGVEVHNAKTKPREEQYNSTYRVVSVLTVLHQDWLNGKEYKCKVSNKALPAPIEKTISKAKGQPREPQVYTLPPSRDELTKNQVSLTCLVKGFYPSDIAVEWESNGQPENNYKTTPPVLDSDGSFFLYSKLTVDKSRWQQGNVFSCSVMHEALHNHYTQKSLSLSPGK

SEQ ID NO: 604 - protein, 447 aa, synthetic construct
  source 1..447: note = HC48
QVQLVQSGAEVKKPGASVKVSCKASGYTFTNHYMHWVRQAPGQGLEWMGIINPISGSTSNAQKFQGRVTMTRDTSTSTVYMELSSLRSEDTAVYYCARDIQDAFDFWGQGTMVTVSSASTKGPSVFPLAPSSKSTSGGTAALGCLVKDYFPEPVTVSWNSGALTSGVHTFPAVLQSSGLYSLSSVVTVPSSSLGTQTYICNVNHKPSNTKVDKKVEPKSCDKTHTCPPCPAPELLGGPSVFLFPPKPKDTLMISRTPEVTCVVVDVSHEDPEVKFNWYVDGVEVHNAKTKPREEQYNSTYRVVSVLTVLHQDWLNGKEYKCKVSNKALPAPIEKTISKAKGQPREPQVYTLPPSRDELTKNQVSLTCLVKGFYPSDIAVEWESNGQPENNYKTTPPVLDSDGSFFLYSKLTVDKSRWQQGNVFSCSVMHEALHNHYTQKSLSLSPGK

SEQ ID NO: 605 - protein, 447 aa, synthetic construct
  source 1..447: note = HC49
QVQLVQSGAEVKKPGASVKVSCKASGYTFTNHYMHWVRQAPGQGLEWMGIINPISGSTSNAQKFQGRVTMTRDTSTSTVYMELSSLRSEDTAVYYCARDIRDAFDFWGQGTMVTVSSASTKGPSVFPLAPSSKSTSGGTAALGCLVKDYFPEPVTVSWNSGALTSGVHTFPAVLQSSGLYSLSSVVTVPSSSLGTQTYICNVNHKPSNTKVDKKVEPKSCDKTHTCPPCPAPELLGGPSVFLFPPKPKDTLMISRTPEVTCVVVDVSHEDPEVKFNWYVDGVEVHNAKTKPREEQYNSTYRVVSVLTVLHQDWLNGKEYKCKVSNKALPAPIEKTISKAKGQPREPQVYTLPPSRDELTKNQVSLTCLVKGFYPSDIAVEWESNGQPENNYKTTPPVLDSDGSFFLYSKLTVDKSRWQQGNVFSCSVMHEALHNHYTQKSLSLSPGK

SEQ ID NO: 606 - protein, 447 aa, synthetic construct
  source 1..447: note = HC50
QVQLVQSGAEVKKPGASVKVSCKASGYTFTNHYMHWVRQAPGQGLEWMGIINPISGSTSNAQKFQGRVTMTRDTSTSTVYMELSSLRSEDTAVYYCARDIVEAFDFWGQGTMVTVSSASTKGPSVFPLAPSSKSTSGGTAALGCLVKDYFPEPVTVSWNSGALTSGVHTFPAVLQSSGLYSLSSVVTVPSSSLGTQTYICNVNHKPSNTKVDKKVEPKSCDKTHTCPPCPAPELLGGPSVFLFPPKPKDTLMISRTPEVTCVVVDVSHEDPEVKFNWYVDGVEVHNAKTKPREEQYNSTYRVVSVLTVLHQDWLNGKEYKCKVSNKALPAPIEKTISKAKGQPREPQVYTLPPSRDELTKNQVSLTCLVKGFYPSDIAVEWESNGQPENNYKTTPPVLDSDGSFFLYSKLTVDKSRWQQGNVFSCSVMHEALHNHYTQKSLSLSPGK

SEQ ID NO: 607 - protein, 447 aa, synthetic construct
  source 1..447: note = HC51
QVQLVQSGAEVKKPGASVKVSCKASGYTFTNHYMHWVRQAPGQGLEWMGIINPISGSTSNAQKFQGRVTMTRDTSTSTVYMELSSLRSEDTAVYYCARDIVFAFDFWGQGTMVTVSSASTKGPSVFPLAPSSKSTSGGTAALGCLVKDYFPEPVTVSWNSGALTSGVHTFPAVLQSSGLYSLSSVVTVPSSSLGTQTYICNVNHKPSNTKVDKKVEPKSCDKTHTCPPCPAPELLGGPSVFLFPPKPKDTLMISRTPEVTCVVVDVSHEDPEVKFNWYVDGVEVHNAKTKPREEQYNSTYRVVSVLTVLHQDWLNGKEYKCKVSNKALPAPIEKTISKAKGQPREPQVYTLPPSRDELTKNQVSLTCLVKGFYPSDIAVEWESNGQPENNYKTTPPVLDSDGSFFLYSKLTVDKSRWQQGNVFSCSVMHEALHNHYTQKSLSLSPGK

SEQ ID NO: 608 - protein, 447 aa, synthetic construct
  source 1..447: note = HC52
QVQLVQSGAEVKKPGASVKVSCKASGYTFTNHYMHWVRQAPGQGLEWMGIINPISGSTSNAQKFQGRVTMTRDTSTSTVYMELSSLRSEDTAVYYCARDIVKAFDFWGQGTMVTVSSASTKGPSVFPLAPSSKSTSGGTAALGCLVKDYFPEPVTVSWNSGALTSGVHTFPAVLQSSGLYSLSSVVTVPSSSLGTQTYICNVNHKPSNTKVDKKVEPKSCDKTHTCPPCPAPELLGGPSVFLFPPKPKDTLMISRTPEVTCVVVDVSHEDPEVKFNWYVDGVEVHNAKTKPREEQYNSTYRVVSVLTVLHQDWLNGKEYKCKVSNKALPAPIEKTISKAKGQPREPQVYTLPPSRDELTKNQVSLTCLVKGFYPSDIAVEWESNGQPENNYKTTPPVLDSDGSFFLYSKLTVDKSRWQQGNVFSCSVMHEALHNHYTQKSLSLSPGK

SEQ ID NO: 609 - protein, 447 aa, synthetic construct
  source 1..447: note = HC53
QVQLVQSGAEVKKPGASVKVSCKASGYTFTNHYMHWVRQAPGQGLEWMGIINPISGSTSNAQKFQGRVTMTRDTSTSTVYMELSSLRSEDTAVYYCARDIVRAFDFWGQGTMVTVSSASTKGPSVFPLAPSSKSTSGGTAALGCLVKDYFPEPVTVSWNSGALTSGVHTFPAVLQSSGLYSLSSVVTVPSSSLGTQTYICNVNHKPSNTKVDKKVEPKSCDKTHTCPPCPAPELLGGPSVFLFPPKPKDTLMISRTPEVTCVVVDVSHEDPEVKFNWYVDGVEVHNAKTKPREEQYNSTYRVVSVLTVLHQDWLNGKEYKCKVSNKALPAPIEKTISKAKGQPREPQVYTLPPSRDELTKNQVSLTCLVKGFYPSDIAVEWESNGQPENNYKTTPPVLDSDGSFFLYSKLTVDKSRWQQGNVFSCSVMHEALHNHYTQKSLSLSPGK

SEQ ID NO: 610 - protein, 447 aa, synthetic construct
  source 1..447: note = HC54
QVQLVQSGAEVKKPGASVKVSCKASGYTFTNHYMHWVRQAPGQGLEWMGIINPISGSTSNAQKFQGRVTMTRDTSTSTVYMELSSLRSEDTAVYYCARDIVYAFDFWGQGTMVTVSSASTKGPSVFPLAPSSKSTSGGTAALGCLVKDYFPEPVTVSWNSGALTSGVHTFPAVLQSSGLYSLSSVVTVPSSSLGTQTYICNVNHKPSNTKVDKKVEPKSCDKTHTCPPCPAPELLGGPSVFLFPPKPKDTLMISRTPEVTCVVVDVSHEDPEVKFNWYVDGVEVHNAKTKPREEQYNSTYRVVSVLTVLHQDWLNGKEYKCKVSNKALPAPIEKTISKAKGQPREPQVYTLPPSRDELTKNQVSLTCLVKGFYPSDIAVEWESNGQPENNYKTTPPVLDSDGSFFLYSKLTVDKSRWQQGNVFSCSVMHEALHNHYTQKSLSLSPGK

SEQ ID NO: 611 - protein, 213 aa, synthetic construct
  source 1..213: note = LC01
AIQLTQSPSSLSASVGDRVTITCRASFGISSALVWYQQKPGKAPKLLIYDASSLESGVPSRFSGSGSGTDFTLTISSLQPEDFATYYCQQFNDYFTFGPGTKVDIKRTVAAPSVFIFPPSDEQLKSGTASVVCLLNNFYPREAKVQWKVDNALQSGNSQESVTEQDSKDSTYSLSSTLTLSKADYEKHKVYACEVTHQGLSSPVTKSFNRGEC

SEQ ID NO: 612 - protein, 213 aa, synthetic construct
  source 1..213: note = LC02
AIQLTQSPSSLSASVGDRVTITCRASRGISSALVWYQQKPGKAPKLLIYDASSLESGVPSRFSGSGSGTDFTLTISSLQPEDFATYYCQQFNDYFTFGPGTKVDIKRTVAAPSVFIFPPSDEQLKSGTASVVCLLNNFYPREAKVQWKVDNALQSGNSQESVTEQDSKDSTYSLSSTLTLSKADYEKHKVYACEVTHQGLSSPVTKSFNRGEC

SEQ ID NO: 613 - protein, 213 aa, synthetic construct
  source 1..213: note = LC03
AIQLTQSPSSLSASVGDRVTITCRASQDISSALVWYQQKPGKAPKLLIYDASSLESGVPSRFSGSGSGTDFTLTISSLQPEDFATYYCQQFNDYFTFGPGTKVDIKRTVAAPSVFIFPPSDEQLKSGTASVVCLLNNFYPREAKVQWKVDNALQSGNSQESVTEQDSKDSTYSLSSTLTLSKADYEKHKVYACEVTHQGLSSPVTKSFNRGEC

SEQ ID NO: 614 - protein, 213 aa, synthetic construct
  source 1..213: note = LC04
AIQLTQSPSSLSASVGDRVTITCRASQQISSALVWYQQKPGKAPKLLIYDASSLESGVPSRFSGSGSGTDFTLTISSLQPEDFATYYCQQFNDYFTFGPGTKVDIKRTVAAPSVFIFPPSDEQLKSGTASVVCLLNNFYPREAKVQWKVDNALQSGNSQESVTEQDSKDSTYSLSSTLTLSKADYEKHKVYACEVTHQGLSSPVTKSFNRGEC

SEQ ID NO: 615 - protein, 213 aa, synthetic construct
  source 1..213: note = LC05
AIQLTQSPSSLSASVGDRVTITCRASQRISSALVWYQQKPGKAPKLLIYDASSLESGVPSRFSGSGSGTDFTLTISSLQPEDFATYYCQQFNDYFTFGPGTKVDIKRTVAAPSVFIFPPSDEQLKSGTASVVCLLNNFYPREAKVQWKVDNALQSGNSQESVTEQDSKDSTYSLSSTLTLSKADYEKHKVYACEVTHQGLSSPVTKSFNRGEC

SEQ ID NO: 616 - protein, 213 aa, synthetic construct
  source 1..213: note = LC06
AIQLTQSPSSLSASVGDRVTITCRASQYISSALVWYQQKPGKAPKLLIYDASSLESGVPSRFSGSGSGTDFTLTISSLQPEDFATYYCQQFNDYFTFGPGTKVDIKRTVAAPSVFIFPPSDEQLKSGTASVVCLLNNFYPREAKVQWKVDNALQSGNSQESVTEQDSKDSTYSLSSTLTLSKADYEKHKVYACEVTHQGLSSPVTKSFNRGEC

SEQ ID NO: 617 - protein, 213 aa, synthetic construct
  source 1..213: note = LC07
AIQLTQSPSSLSASVGDRVTITCRASQGIDSALVWYQQKPGKAPKLLIYDASSLESGVPSRFSGSGSGTDFTLTISSLQPEDFATYYCQQFNDYFTFGPGTKVDIKRTVAAPSVFIFPPSDEQLKSGTASVVCLLNNFYPREAKVQWKVDNALQSGNSQESVTEQDSKDSTYSLSSTLTLSKADYEKHKVYACEVTHQGLSSPVTKSFNRGEC

SEQ ID NO: 618 - protein, 213 aa, synthetic construct
  source 1..213: note = LC08
AIQLTQSPSSLSASVGDRVTITCRASQGIFSALVWYQQKPGKAPKLLIYDASSLESGVPSRFSGSGSGTDFTLTISSLQPEDFATYYCQQFNDYFTFGPGTKVDIKRTVAAPSVFIFPPSDEQLKSGTASVVCLLNNFYPREAKVQWKVDNALQSGNSQESVTEQDSKDSTYSLSSTLTLSKADYEKHKVYACEVTHQGLSSPVTKSFNRGEC

SEQ ID NO: 619 - protein, 213 aa, synthetic construct
  source 1..213: note = LC09
AIQLTQSPSSLSASVGDRVTITCRASQGIRSALVWYQQKPGKAPKLLIYDASSLESGVPSRFSGSGSGTDFTLTISSLQPEDFATYYCQQFNDYFTFGPGTKVDIKRTVAAPSVFIFPPSDEQLKSGTASVVCLLNNFYPREAKVQWKVDNALQSGNSQESVTEQDSKDSTYSLSSTLTLSKADYEKHKVYACEVTHQGLSSPVTKSFNRGEC

SEQ ID NO: 620 - protein, 213 aa, synthetic construct
  source 1..213: note = LC10
AIQLTQSPSSLSASVGDRVTITCRASQGIYSALVWYQQKPGKAPKLLIYDASSLESGVPSRFSGSGSGTDFTLTISSLQPEDFATYYCQQFNDYFTFGPGTKVDIKRTVAAPSVFIFPPSDEQLKSGTASVVCLLNNFYPREAKVQWKVDNALQSGNSQESVTEQDSKDSTYSLSSTLTLSKADYEKHKVYACEVTHQGLSSPVTKSFNRGEC

SEQ ID NO: 621 - protein, 213 aa, synthetic construct
  source 1..213: note = LC11
AIQLTQSPSSLSASVGDRVTITCRASQGISFALVWYQQKPGKAPKLLIYDASSLESGVPSRFSGSGSGTDFTLTISSLQPEDFATYYCQQFNDYFTFGPGTKVDIKRTVAAPSVFIFPPSDEQLKSGTASVVCLLNNFYPREAKVQWKVDNALQSGNSQESVTEQDSKDSTYSLSSTLTLSKADYEKHKVYACEVTHQGLSSPVTKSFNRGEC

SEQ ID NO: 622 - protein, 213 aa, synthetic construct
  source 1..213: note = LC12
AIQLTQSPSSLSASVGDRVTITCRASQGISYALVWYQQKPGKAPKLLIYDASSLESGVPSRFSGSGSGTDFTLTISSLQPEDFATYYCQQFNDYFTFGPGTKVDIKRTVAAPSVFIFPPSDEQLKSGTASVVCLLNNFYPREAKVQWKVDNALQSGNSQESVTEQDSKDSTYSLSSTLTLSKADYEKHKVYACEVTHQGLSSPVTKSFNRGEC

SEQ ID NO: 623 - protein, 213 aa, synthetic construct
  source 1..213: note = LC13
AIQLTQSPSSLSASVGDRVTITCRASQGISSALVWYQQKPGKAPKLLIYEASSLESGVPSRFSGSGSGTDFTLTISSLQPEDFATYYCQQFNDYFTFGPGTKVDIKRTVAAPSVFIFPPSDEQLKSGTASVVCLLNNFYPREAKVQWKVDNALQSGNSQESVTEQDSKDSTYSLSSTLTLSKADYEKHKVYACEVTHQGLSSPVTKSFNRGEC

SEQ ID NO: 624 - protein, 213 aa, synthetic construct
  source 1..213: note = LC14
AIQLTQSPSSLSASVGDRVTITCRASQGISSALVWYQQKPGKAPKLLIYQASSLESGVPSRFSGSGSGTDFTLTISSLQPEDFATYYCQQFNDYFTFGPGTKVDIKRTVAAPSVFIFPPSDEQLKSGTASVVCLLNNFYPREAKVQWKVDNALQSGNSQESVTEQDSKDSTYSLSSTLTLSKADYEKHKVYACEVTHQGLSSPVTKSFNRGEC

SEQ ID NO: 625 - protein, 213 aa, synthetic construct
  source 1..213: note = LC15
AIQLTQSPSSLSASVGDRVTITCRASQGISSALVWYQQKPGKAPKLLIYRASSLESGVPSRFSGSGSGTDFTLTISSLQPEDFATYYCQQFNDYFTFGPGTKVDIKRTVAAPSVFIFPPSDEQLKSGTASVVCLLNNFYPREAKVQWKVDNALQSGNSQESVTEQDSKDSTYSLSSTLTLSKADYEKHKVYACEVTHQGLSSPVTKSFNRGEC

SEQ ID NO: 626 - protein, 213 aa, synthetic construct
  source 1..213: note = LC16
AIQLTQSPSSLSASVGDRVTITCRASQGISSALVWYQQKPGKAPKLLIYYASSLESGVPSRFSGSGSGTDFTLTISSLQPEDFATYYCQQFNDYFTFGPGTKVDIKRTVAAPSVFIFPPSDEQLKSGTASVVCLLNNFYPREAKVQWKVDNALQSGNSQESVTEQDSKDSTYSLSSTLTLSKADYEKHKVYACEVTHQGLSSPVTKSFNRGEC

SEQ ID NO: 627 - protein, 213 aa, synthetic construct
  source 1..213: note = LC17
AIQLTQSPSSLSASVGDRVTITCRASQGISSALVWYQQKPGKAPKLLIYDAESLESGVPSRFSGSGSGTDFTLTISSLQPEDFATYYCQQFNDYFTFGPGTKVDIKRTVAAPSVFIFPPSDEQLKSGTASVVCLLNNFYPREAKVQWKVDNALQSGNSQESVTEQDSKDSTYSLSSTLTLSKADYEKHKVYACEVTHQGLSSPVTKSFNRGEC

SEQ ID NO: 628 - protein, 213 aa, synthetic construct
  source 1..213: note = LC18
AIQLTQSPSSLSASVGDRVTITCRASQGISSALVWYQQKPGKAPKLLIYDAQSLESGVPSRFSGSGSGTDFTLTISSLQPEDFATYYCQQFNDYFTFGPGTKVDIKRTVAAPSVFIFPPSDEQLKSGTASVVCLLNNFYPREAKVQWKVDNALQSGNSQESVTEQDSKDSTYSLSSTLTLSKADYEKHKVYACEVTHQGLSSPVTKSFNRGEC

SEQ ID NO: 629 - protein, 213 aa, synthetic construct
  source 1..213: note = LC19
AIQLTQSPSSLSASVGDRVTITCRASQGISSALVWYQQKPGKAPKLLIYDARSLESGVPSRFSGSGSGTDFTLTISSLQPEDFATYYCQQFNDYFTFGPGTKVDIKRTVAAPSVFIFPPSDEQLKSGTASVVCLLNNFYPREAKVQWKVDNALQSGNSQESVTEQDSKDSTYSLSSTLTLSKADYEKHKVYACEVTHQGLSSPVTKSFNRGEC

SEQ ID NO: 630 - protein, 213 aa, synthetic construct
  source 1..213: note = LC20
AIQLTQSPSSLSASVGDRVTITCRASQGISSALVWYQQKPGKAPKLLIYDAYSLESGVPSRFSGSGSGTDFTLTISSLQPEDFATYYCQQFNDYFTFGPGTKVDIKRTVAAPSVFIFPPSDEQLKSGTASVVCLLNNFYPREAKVQWKVDNALQSGNSQESVTEQDSKDSTYSLSSTLTLSKADYEKHKVYACEVTHQGLSSPVTKSFNRGEC

SEQ ID NO: 631 - protein, 213 aa, synthetic construct
  source 1..213: note = LC21
AIQLTQSPSSLSASVGDRVTITCRASQGISSALVWYQQKPGKAPKLLIYDASRLESGVPSRFSGSGSGTDFTLTISSLQPEDFATYYCQQFNDYFTFGPGTKVDIKRTVAAPSVFIFPPSDEQLKSGTASVVCLLNNFYPREAKVQWKVDNALQSGNSQESVTEQDSKDSTYSLSSTLTLSKADYEKHKVYACEVTHQGLSSPVTKSFNRGEC

SEQ ID NO: 632 - protein, 213 aa, synthetic construct
  source 1..213: note = LC22
AIQLTQSPSSLSASVGDRVTITCRASQGISSALVWYQQKPGKAPKLLIYDASYLESGVPSRFSGSGSGTDFTLTISSLQPEDFATYYCQQFNDYFTFGPGTKVDIKRTVAAPSVFIFPPSDEQLKSGTASVVCLLNNFYPREAKVQWKVDNALQSGNSQESVTEQDSKDSTYSLSSTLTLSKADYEKHKVYACEVTHQGLSSPVTKSFNRGEC

SEQ ID NO: 633 - protein, 213 aa, synthetic construct
  source 1..213: note = LC23
AIQLTQSPSSLSASVGDRVTITCRASQGISSALVWYQQKPGKAPKLLIYDASSEESGVPSRFSGSGSGTDFTLTISSLQPEDFATYYCQQFNDYFTFGPGTKVDIKRTVAAPSVFIFPPSDEQLKSGTASVVCLLNNFYPREAKVQWKVDNALQSGNSQESVTEQDSKDSTYSLSSTLTLSKADYEKHKVYACEVTHQGLSSPVTKSFNRGEC

SEQ ID NO: 634 - protein, 213 aa, synthetic construct
  source 1..213: note = LC24
AIQLTQSPSSLSASVGDRVTITCRASQGISSALVWYQQKPGKAPKLLIYDASSYESGVPSRFSGSGSGTDFTLTISSLQPEDFATYYCQQFNDYFTFGPGTKVDIKRTVAAPSVFIFPPSDEQLKSGTASVVCLLNNFYPREAKVQWKVDNALQSGNSQESVTEQDSKDSTYSLSSTLTLSKADYEKHKVYACEVTHQGLSSPVTKSFNRGEC

SEQ ID NO: 635 - protein, 213 aa, synthetic construct
  source 1..213: note = LC25
AIQLTQSPSSLSASVGDRVTITCRASQGISSALVWYQQKPGKAPKLLIYDASSLRSGVPSRFSGSGSGTDFTLTISSLQPEDFATYYCQQFNDYFTFGPGTKVDIKRTVAAPSVFIFPPSDEQLKSGTASVVCLLNNFYPREAKVQWKVDNALQSGNSQESVTEQDSKDSTYSLSSTLTLSKADYEKHKVYACEVTHQGLSSPVTKSFNRGEC

SEQ ID NO: 636 - protein, 213 aa, synthetic construct
  source 1..213: note = LC26
AIQLTQSPSSLSASVGDRVTITCRASQGISSALVWYQQKPGKAPKLLIYDASSLYSGVPSRFSGSGSGTDFTLTISSLQPEDFATYYCQQFNDYFTFGPGTKVDIKRTVAAPSVFIFPPSDEQLKSGTASVVCLLNNFYPREAKVQWKVDNALQSGNSQESVTEQDSKDSTYSLSSTLTLSKADYEKHKVYACEVTHQGLSSPVTKSFNRGEC

SEQ ID NO: 637 - protein, 213 aa, synthetic construct
  source 1..213: note = LC27
AIQLTQSPSSLSASVGDRVTITCRASQGISSALVWYQQKPGKAPKLLIYDASSLESGVPSRFSGSGEGTDFTLTISSLQPEDFATYYCQQFNDYFTFGPGTKVDIKRTVAAPSVFIFPPSDEQLKSGTASVVCLLNNFYPREAKVQWKVDNALQSGNSQESVTEQDSKDSTYSLSSTLTLSKADYEKHKVYACEVTHQGLSSPVTKSFNRGEC

SEQ ID NO: 638 - protein, 213 aa, synthetic construct
  source 1..213: note = LC28
AIQLTQSPSSLSASVGDRVTITCRASQGISSALVWYQQKPGKAPKLLIYDASSLESGVPSRFSGSGRGTDFTLTISSLQPEDFATYYCQQFNDYFTFGPGTKVDIKRTVAAPSVFIFPPSDEQLKSGTASVVCLLNNFYPREAKVQWKVDNALQSGNSQESVTEQDSKDSTYSLSSTLTLSKADYEKHKVYACEVTHQGLSSPVTKSFNRGEC

SEQ ID NO: 639 - protein, 213 aa, synthetic construct
  source 1..213: note = LC29
AIQLTQSPSSLSASVGDRVTITCRASQGISSALVWYQQKPGKAPKLLIYDASSLESGVPSRFSGSGYGTDFTLTISSLQPEDFATYYCQQFNDYFTFGPGTKVDIKRTVAAPSVFIFPPSDEQLKSGTASVVCLLNNFYPREAKVQWKVDNALQSGNSQESVTEQDSKDSTYSLSSTLTLSKADYEKHKVYACEVTHQGLSSPVTKSFNRGEC

SEQ ID NO: 640 - protein, 213 aa, synthetic construct
  source 1..213: note = LC30
AIQLTQSPSSLSASVGDRVTITCRASQGISSALVWYQQKPGKAPKLLIYDASSLESGVPSRFSGSGSGRDFTLTISSLQPEDFATYYCQQFNDYFTFGPGTKVDIKRTVAAPSVFIFPPSDEQLKSGTASVVCLLNNFYPREAKVQWKVDNALQSGNSQESVTEQDSKDSTYSLSSTLTLSKADYEKHKVYACEVTHQGLSSPVTKSFNRGEC

SEQ ID NO: 641 - protein, 213 aa, synthetic construct
  source 1..213: note = LC31
AIQLTQSPSSLSASVGDRVTITCRASQGISSALVWYQQKPGKAPKLLIYDASSLESGVPSRFSGSGSGYDFTLTISSLQPEDFATYYCQQFNDYFTFGPGTKVDIKRTVAAPSVFIFPPSDEQLKSGTASVVCLLNNFYPREAKVQWKVDNALQSGNSQESVTEQDSKDSTYSLSSTLTLSKADYEKHKVYACEVTHQGLSSPVTKSFNRGEC

SEQ ID NO: 642 - protein, 213 aa, synthetic construct
  source 1..213: note = LC32
AIQLTQSPSSLSASVGDRVTITCRASQGISSALVWYQQKPGKAPKLLIYDASSLESGVPSRFSGSGSGTDFTLTISSLQPEDFATYYCQQENDYFTFGPGTKVDIKRTVAAPSVFIFPPSDEQLKSGTASVVCLLNNFYPREAKVQWKVDNALQSGNSQESVTEQDSKDSTYSLSSTLTLSKADYEKHKVYACEVTHQGLSSPVTKSFNRGEC

SEQ ID NO: 643 - protein, 213 aa, synthetic construct
  source 1..213: note = LC33
AIQLTQSPSSLSASVGDRVTITCRASQGISSALVWYQQKPGKAPKLLIYDASSLESGVPSRFSGSGSGTDFTLTISSLQPEDFATYYCQQRNDYFTFGPGTKVDIKRTVAAPSVFIFPPSDEQLKSGTASVVCLLNNFYPREAKVQWKVDNALQSGNSQESVTEQDSKDSTYSLSSTLTLSKADYEKHKVYACEVTHQGLSSPVTKSFNRGEC

SEQ ID NO: 644 - protein, 213 aa, synthetic construct
  source 1..213: note = LC34
AIQLTQSPSSLSASVGDRVTITCRASQGISSALVWYQQKPGKAPKLLIYDASSLESGVPSRFSGSGSGTDFTLTISSLQPEDFATYYCQQFEDYFTFGPGTKVDIKRTVAAPSVFIFPPSDEQLKSGTASVVCLLNNFYPREAKVQWKVDNALQSGNSQESVTEQDSKDSTYSLSSTLTLSKADYEKHKVYACEVTHQGLSSPVTKSFNRGEC

SEQ ID NO: 645 - protein, 213 aa, synthetic construct
  source 1..213: note = LC35
AIQLTQSPSSLSASVGDRVTITCRASQGISSALVWYQQKPGKAPKLLIYDASSLESGVPSRFSGSGSGTDFTLTISSLQPEDFATYYCQQFFDYFTFGPGTKVDIKRTVAAPSVFIFPPSDEQLKSGTASVVCLLNNFYPREAKVQWKVDNALQSGNSQESVTEQDSKDSTYSLSSTLTLSKADYEKHKVYACEVTHQGLSSPVTKSFNRGEC

SEQ ID NO: 646 - protein, 213 aa, synthetic construct
  source 1..213: note = LC36
AIQLTQSPSSLSASVGDRVTITCRASQGISSALVWYQQKPGKAPKLLIYDASSLESGVPSRFSGSGSGTDFTLTISSLQPEDFATYYCQQFQDYFTFGPGTKVDIKRTVAAPSVFIFPPSDEQLKSGTASVVCLLNNFYPREAKVQWKVDNALQSGNSQESVTEQDSKDSTYSLSSTLTLSKADYEKHKVYACEVTHQGLSSPVTKSFNRGEC

SEQ ID NO: 647 - protein, 213 aa, synthetic construct
  source 1..213: note = LC37
AIQLTQSPSSLSASVGDRVTITCRASQGISSALVWYQQKPGKAPKLLIYDASSLESGVPSRFSGSGSGTDFTLTISSLQPEDFATYYCQQFRDYFTFGPGTKVDIKRTVAAPSVFIFPPSDEQLKSGTASVVCLLNNFYPREAKVQWKVDNALQSGNSQESVTEQDSKDSTYSLSSTLTLSKADYEKHKVYACEVTHQGLSSPVTKSFNRGEC

SEQ ID NO: 648 - protein, 213 aa, synthetic construct
  source 1..213: note = LC38
AIQLTQSPSSLSASVGDRVTITCRASQGISSALVWYQQKPGKAPKLLIYDASSLESGVPSRFSGSGSGTDFTLTISSLQPEDFATYYCQQFYDYFTFGPGTKVDIKRTVAAPSVFIFPPSDEQLKSGTASVVCLLNNFYPREAKVQWKVDNALQSGNSQESVTEQDSKDSTYSLSSTLTLSKADYEKHKVYACEVTHQGLSSPVTKSFNRGEC

SEQ ID NO: 649 - protein, 213 aa, synthetic construct
  source 1..213: note = LC39
AIQLTQSPSSLSASVGDRVTITCRASQGISSALVWYQQKPGKAPKLLIYDASSLESGVPSRFSGSGSGTDFTLTISSLQPEDFATYYCQQFNFYFTFGPGTKVDIKRTVAAPSVFIFPPSDEQLKSGTASVVCLLNNFYPREAKVQWKVDNALQSGNSQESVTEQDSKDSTYSLSSTLTLSKADYEKHKVYACEVTHQGLSSPVTKSFNRGEC

SEQ ID NO: 650 - protein, 213 aa, synthetic construct
  source 1..213: note = LC40
AIQLTQSPSSLSASVGDRVTITCRASQGISSALVWYQQKPGKAPKLLIYDASSLESGVPSRFSGSGSGTDFTLTISSLQPEDFATYYCQQFNRYFTFGPGTKVDIKRTVAAPSVFIFPPSDEQLKSGTASVVCLLNNFYPREAKVQWKVDNALQSGNSQESVTEQDSKDSTYSLSSTLTLSKADYEKHKVYACEVTHQGLSSPVTKSFNRGEC

SEQ ID NO: 651 - protein, 213 aa, synthetic construct
  source 1..213: note = LC41
AIQLTQSPSSLSASVGDRVTITCRASQGISSALVWYQQKPGKAPKLLIYDASSLESGVPSRFSGSGSGTDFTLTISSLQPEDFATYYCQQFNYYFTFGPGTKVDIKRTVAAPSVFIFPPSDEQLKSGTASVVCLLNNFYPREAKVQWKVDNALQSGNSQESVTEQDSKDSTYSLSSTLTLSKADYEKHKVYACEVTHQGLSSPVTKSFNRGEC

SEQ ID NO: 652 - protein, 213 aa, synthetic construct
  source 1..213: note = LC42
AIQLTQSPSSLSASVGDRVTITCRASQGISSALVWYQQKPGKAPKLLIYDASSLESGVPSRFSGSGSGTDFTLTISSLQPEDFATYYCQQFNDEFTFGPGTKVDIKRTVAAPSVFIFPPSDEQLKSGTASVVCLLNNFYPREAKVQWKVDNALQSGNSQESVTEQDSKDSTYSLSSTLTLSKADYEKHKVYACEVTHQGLSSPVTKSFNRGEC

SEQ ID NO: 653 - protein, 213 aa, synthetic construct
  source 1..213: note = LC43
AIQLTQSPSSLSASVGDRVTITCRASQGISSALVWYQQKPGKAPKLLIYDASSLESGVPSRFSGSGSGTDFTLTISSLQPEDFATYYCQQFNDRFTFGPGTKVDIKRTVAAPSVFIFPPSDEQLKSGTASVVCLLNNFYPREAKVQWKVDNALQSGNSQESVTEQDSKDSTYSLSSTLTLSKADYEKHKVYACEVTHQGLSSPVTKSFNRGEC

SEQ ID NO: 654 - protein, 447 aa, synthetic construct; identical to SEQ ID NO: 1
  source 1..447: note = UGX001 heavy chain sequence

SEQ ID NO: 655 - protein, 213 aa, synthetic construct; identical to SEQ ID NO: 611
  source 1..213: note = UGX001 light chain sequence

SEQ ID NO: 656 - protein, 117 aa, synthetic construct; identical to SEQ ID NO: 3
  source 1..117: note = UGX001 heavy chain variable region sequence

SEQ ID NO: 657 - protein, 107 aa, synthetic construct; identical to SEQ ID NO: 515
  source 1..107: note = UGX001 light chain variable region sequence

SEQ ID NO: 658 - protein, 447 aa, synthetic construct; identical to SEQ ID NO: 1
  source 1..447: note = UGX002 heavy chain sequence

SEQ ID NO: 659 - protein, 213 aa, synthetic construct; identical to SEQ ID NO: 612
  source 1..213: note = UGX002 light chain sequence

SEQ ID NO: 660 - protein, 117 aa, synthetic construct; identical to SEQ ID NO: 3
  source 1..117: note = UGX002 heavy chain variable region sequence

SEQ ID NO: 661 - protein, 107 aa, synthetic construct; identical to SEQ ID NO: 516
  source 1..107: note = UGX002 light chain variable region sequence

SEQ ID NO: 662 - protein, 447 aa, synthetic construct; identical to SEQ ID NO: 1
  source 1..447: note = UGX003 heavy chain sequence

SEQ ID NO: 663 - protein, 213 aa, synthetic construct; identical to SEQ ID NO: 613
  source 1..213: note = UGX003 light chain sequence

SEQ ID NO: 664 - protein, 117 aa, synthetic construct; identical to SEQ ID NO: 3
  source 1..117: note = UGX003 heavy chain variable region sequence

SEQ ID NO: 665 - protein, 107 aa, synthetic construct; identical to SEQ ID NO: 517
  source 1..107: note = UGX003 light chain variable region sequence

SEQ ID NO: 666 - protein, 447 aa, synthetic construct; identical to SEQ ID NO: 1
  source 1..447: note = UGX004 heavy chain sequence

SEQ ID NO: 667 - protein, 213 aa, synthetic construct; identical to SEQ ID NO: 614
  source 1..213: note = UGX004 light chain sequence

SEQ ID NO: 668 - protein, 117 aa, synthetic construct; identical to SEQ ID NO: 3
  source 1..117: note = UGX004 heavy chain variable region sequence

SEQ ID NO: 669 - protein, 107 aa, synthetic construct; identical to SEQ ID NO: 518
  source 1..107: note = UGX004 light chain variable region sequence

SEQ ID NO: 670 - protein, 447 aa, synthetic construct; identical to SEQ ID NO: 1
  source 1..447: note = UGX005 heavy chain sequence

SEQ ID NO: 671 - protein, 213 aa, synthetic construct; identical to SEQ ID NO: 615
  source 1..213: note = UGX005 light chain sequence

SEQ ID NO: 672 - protein, 117 aa, synthetic construct; identical to SEQ ID NO: 3
  source 1..117: note = UGX005 heavy chain variable region sequence

SEQ ID NO: 673 - protein, 107 aa, synthetic construct; identical to SEQ ID NO: 519
  source 1..107: note = UGX005 light chain variable region sequence

SEQ ID NO: 674 - protein, 447 aa, synthetic construct; identical to SEQ ID NO: 1
  source 1..447: note = UGX006 heavy chain sequence

SEQ ID NO: 675 - protein, 213 aa, synthetic construct; identical to SEQ ID NO: 616
  source 1..213: note = UGX006 light chain sequence

SEQ ID NO: 676 - protein, 117 aa, synthetic construct; identical to SEQ ID NO: 3
  source 1..117: note = UGX006 heavy chain variable region sequence

SEQ ID NO: 677 - protein, 107 aa, synthetic construct; identical to SEQ ID NO: 520
  source 1..107: note = UGX006 light chain variable region sequence

SEQ ID NO: 678 - protein, 447 aa, synthetic construct; identical to SEQ ID NO: 1
  source 1..447: note = UGX007 heavy chain sequence

SEQ ID NO: 679 - protein, 213 aa, synthetic construct; identical to SEQ ID NO: 617
  source 1..213: note = UGX007 light chain sequence

SEQ ID NO: 680 - protein, 117 aa, synthetic construct; identical to SEQ ID NO: 3
  source 1..117: note = UGX007 heavy chain variable region sequence

SEQ ID NO: 681 - protein, 107 aa, synthetic construct; identical to SEQ ID NO: 273
  source 1..107: note = UGX007 light chain variable region sequence

SEQ ID NO: 682 - protein, 447 aa, synthetic construct; identical to SEQ ID NO: 1
  source 1..447: note = UGX008 heavy chain sequence

SEQ ID NO: 683 - protein, 213 aa, synthetic construct; identical to SEQ ID NO: 618
  source 1..213: note = UGX008 light chain sequence

SEQ ID NO: 684 - protein, 117 aa, synthetic construct; identical to SEQ ID NO: 3
  source 1..117: note = UGX008 heavy chain variable region sequence

SEQ ID NO: 685 - protein, 107 aa, synthetic construct; identical to SEQ ID NO: 275
  source 1..107: note = UGX008 light chain variable region sequence

SEQ ID NO: 686 - protein, 447 aa, synthetic construct; identical to SEQ ID NO: 1
  source 1..447: note = UGX009 heavy chain sequence

SEQ ID NO: 687 - protein, 213 aa, synthetic construct; identical to SEQ ID NO: 619
  source 1..213: note = UGX009 light chain sequence

SEQ ID NO: 688 - protein, 117 aa, synthetic construct; identical to SEQ ID NO: 3
  source 1..117: note = UGX009 heavy chain variable region sequence

SEQ ID NO: 689 - protein, 107 aa, synthetic construct; identical to SEQ ID NO: 523
  source 1..107: note = UGX009 light chain variable region sequence

SEQ ID NO: 690 - protein, 447 aa, synthetic construct; identical to SEQ ID NO: 1
  source 1..447: note = UGX010 heavy chain sequence

SEQ ID NO: 691 - protein, 213 aa, synthetic construct; identical to SEQ ID NO: 620
  source 1..213: note = UGX010 light chain sequence

SEQ ID NO: 692 - protein, 117 aa, synthetic construct; identical to SEQ ID NO: 3
  source 1..117: note = UGX010 heavy chain variable region sequence

SEQ ID NO: 693 - protein, 107 aa, synthetic construct; identical to SEQ ID NO: 278
  source 1..107: note = UGX010 light chain variable region sequence

SEQ ID NO: 694 - protein, 447 aa, synthetic construct; identical to SEQ ID NO: 1
  source 1..447: note = UGX011 heavy chain sequence

SEQ ID NO: 695 - protein, 213 aa, synthetic construct; identical to SEQ ID NO: 621
  source 1..213: note = UGX011 light chain sequence

SEQ ID NO: 696 - protein, 117 aa, synthetic construct; identical to SEQ ID NO: 3
  source 1..117: note = UGX011 heavy chain variable region sequence

SEQ ID NO: 697 - protein, 107 aa, synthetic construct; identical to SEQ ID NO: 281
  source 1..107: note = UGX011 light chain variable region sequence

SEQ ID NO: 698 - protein, 447 aa, synthetic construct; identical to SEQ ID NO: 1
  source 1..447: note = UGX012 heavy chain sequence

SEQ ID NO: 699 - protein, 213 aa, synthetic construct; identical to SEQ ID NO: 622
  source 1..213: note = UGX012 light chain sequence

SEQ ID NO: 700 - protein, 117 aa, synthetic construct; identical to SEQ ID NO: 3
  source 1..117: note = UGX012 heavy chain variable region sequence

SEQ ID NO: 701 - protein, 107 aa, synthetic construct; identical to SEQ ID NO: 283
  source 1..107: note = UGX012 light chain variable region sequence

SEQ ID NO: 702 - protein, 447 aa, synthetic construct; identical to SEQ ID NO: 1
  source 1..447: note = UGX013 heavy chain sequence

SEQ ID NO: 703 - protein, 213 aa, synthetic construct; identical to SEQ ID NO: 623
  source 1..213: note = UGX013 light chain sequence

SEQ ID NO: 704 - protein, 117 aa, synthetic construct; identical to SEQ ID NO: 3
  source 1..117: note = UGX013 heavy chain variable region sequence

SEQ ID NO: 705 - protein, 107 aa, synthetic construct; identical to SEQ ID NO: 326
  source 1..107: note = UGX013 light chain variable region sequence

SEQ ID NO: 706 - protein, 447 aa, synthetic construct; identical to SEQ ID NO: 1
  source 1..447: note = UGX014 heavy chain sequence

SEQ ID NO: 707 - protein, 213 aa, synthetic construct; identical to SEQ ID NO: 624
  source 1..213: note = UGX014 light chain sequence

SEQ ID NO: 708 - protein, 117 aa, synthetic construct; identical to SEQ ID NO: 3
  source 1..117: note = UGX014 heavy chain variable region sequence

SEQ ID NO: 709 - protein, 107 aa, synthetic construct; identical to SEQ ID NO: 292
  source 1..107: note = UGX014 light chain variable region sequence

SEQ ID NO: 710 - protein, 447 aa, synthetic construct; identical to SEQ ID NO: 1
  source 1..447: note = UGX015 heavy chain sequence

SEQ ID NO: 711 - protein, 213 aa, synthetic construct; identical to SEQ ID NO: 625
  source 1..213: note = UGX015 light chain sequence

SEQ ID NO: 712 - protein, 117 aa, synthetic construct; identical to SEQ ID NO: 3
  source 1..117: note = UGX015 heavy chain variable region sequence

SEQ ID NO: 713 - protein, 107 aa, synthetic construct; identical to SEQ ID NO: 293
  source 1..107: note = UGX015 light chain variable region sequence

SEQ ID NO: 714 - protein, 447 aa, synthetic construct; identical to SEQ ID NO: 1
  source 1..447: note = UGX016 heavy chain sequence

SEQ ID NO: 715 - protein, 213 aa, synthetic construct; identical to SEQ ID NO: 626
  source 1..213: note = UGX016 light chain sequence

SEQ ID NO: 716 - protein, 117 aa, synthetic construct; identical to SEQ ID NO: 3
  source 1..117: note = UGX016 heavy chain variable region sequence

SEQ ID NO: 717 - protein, 107 aa, synthetic construct; identical to SEQ ID NO: 530
  source 1..107: note = UGX016 light chain variable region sequence

SEQ ID NO: 718 - protein, 447 aa, synthetic construct; identical to SEQ ID NO: 1
  source 1..447: note = UGX017 heavy chain sequence

SEQ ID NO: 719 - protein, 213 aa, synthetic construct; identical to SEQ ID NO: 627
  source 1..213: note = UGX017 light chain sequence

SEQ ID NO: 720 - protein, 117 aa, synthetic construct; identical to SEQ ID NO: 3
  source 1..117: note = UGX017 heavy chain variable region sequence

SEQ ID NO: 721 - protein, 107 aa, synthetic construct; identical to SEQ ID NO: 306
  source 1..107: note = UGX017 light chain variable region sequence

SEQ ID NO: 722 - protein, 447 aa, synthetic construct; identical to SEQ ID NO: 1
  source 1..447: note = UGX018 heavy chain sequence

SEQ ID NO: 723 - protein, 213 aa, synthetic construct; identical to SEQ ID NO: 628
  source 1..213: note = UGX018 light chain sequence

SEQ ID NO: 724 - protein, 117 aa, synthetic construct; identical to SEQ ID NO: 3
  source 1..117: note = UGX018 heavy chain variable region sequence

SEQ ID NO: 725 - protein, 107 aa, synthetic construct; identical to SEQ ID NO: 339
  source 1..107: note = UGX018 light chain variable region sequence

SEQ ID NO: 726 - protein, 447 aa, synthetic construct; identical to SEQ ID NO: 1
  source 1..447: note = UGX019 heavy chain sequence

SEQ ID NO: 727 - protein, 213 aa, synthetic construct; identical to SEQ ID NO: 629
  source 1..213: note = UGX019 light chain sequence

SEQ ID NO: 728 - protein, 117 aa, synthetic construct; identical to SEQ ID NO: 3
  source 1..117: note = UGX019 heavy chain variable region sequence

SEQ ID NO: 729 - protein, 107 aa, synthetic construct; identical to SEQ ID NO: 533
  source 1..107: note = UGX019 light chain variable region sequence

SEQ ID NO: 730 - protein, 447 aa, synthetic construct; identical to SEQ ID NO: 1
  source 1..447: note = UGX020 heavy chain sequence

SEQ ID NO: 731 - protein, 213 aa, synthetic construct; identical to SEQ ID NO: 630
  source 1..213: note = UGX020 light chain sequence

SEQ ID NO: 732 - protein, 117 aa, synthetic construct; identical to SEQ ID NO: 3
  source 1..117: note = UGX020 heavy chain variable region sequence

SEQ ID NO: 733 - protein, 107 aa, synthetic construct; identical to SEQ ID NO: 344
  source 1..107: note = UGX020 light chain variable region sequence

SEQ ID NO: 734 - protein, 447 aa, synthetic construct; identical to SEQ ID NO: 1
  source 1..447: note = UGX021 heavy chain sequence

SEQ ID NO: 735 - protein, 213 aa, synthetic construct; identical to SEQ ID NO: 631
  source 1..213: note = UGX021 light chain sequence

SEQ ID NO: 736 - protein, 117 aa, synthetic construct; identical to SEQ ID NO: 3
  source 1..117: note = UGX021 heavy chain variable region sequence

SEQ ID NO: 737 - protein, 107 aa, synthetic construct; identical to SEQ ID NO: 315
  source 1..107: note = UGX021 light chain variable region sequence

SEQ ID NO: 738 - protein, 447 aa, synthetic construct; identical to SEQ ID NO: 1
  source 1..447: note = UGX022 heavy chain sequence

SEQ ID NO: 739 - protein, 213 aa, synthetic construct; identical to SEQ ID NO: 632
  source 1..213: note = UGX022 light chain sequence

SEQ ID NO: 740 - protein, 117 aa, synthetic construct; identical to SEQ ID NO: 3
  source 1..117: note = UGX022 heavy chain variable region sequence

SEQ ID NO: 741 - protein, 107 aa, synthetic construct; identical to SEQ ID NO: 317
  source 1..107: note = UGX022 light chain variable region sequence

SEQ ID NO: 742 - protein, 447 aa, synthetic construct; identical to SEQ ID NO: 1
  source 1..447: note = UGX023 heavy chain sequence

SEQ ID NO: 743 - protein, 213 aa, synthetic construct; identical to SEQ ID NO: 633
  source 1..213: note = UGX023 light chain sequence

SEQ ID NO: 744 - protein, 117 aa, synthetic construct; identical to SEQ ID NO: 3
  source 1..117: note = UGX023 heavy chain variable region sequence

SEQ ID NO: 745 - protein, 107 aa, synthetic construct; identical to SEQ ID NO: 537
  source 1..107: note = UGX023 light chain variable region sequence

SEQ ID NO: 746 - protein, 447 aa, synthetic construct; identical to SEQ ID NO: 1
  source 1..447: note = UGX024 heavy chain sequence

SEQ ID NO: 747 - protein, 213 aa, synthetic construct; identical to SEQ ID NO: 634
  source 1..213: note = UGX024 light chain sequence

SEQ ID NO: 748 - protein, 117 aa, synthetic construct; identical to SEQ ID NO: 3
  source 1..117: note = UGX024 heavy chain variable region sequence

SEQ ID NO: 749 - protein, 107 aa, synthetic construct; identical to SEQ ID NO: 538
  source 1..107: note = UGX024 light chain variable region sequence

SEQ ID NO: 750 - protein, 447 aa, synthetic construct; identical to SEQ ID NO: 1
  source 1..447: note = UGX025 heavy chain sequence

SEQ ID NO: 751 - protein, 213 aa, synthetic construct; identical to SEQ ID NO: 635
  source 1..213: note = UGX025 light chain sequence

SEQ ID NO: 752 - protein, 117 aa, synthetic construct; identical to SEQ ID NO: 3
  source 1..117: note = UGX025 heavy chain variable region sequence

SEQ ID NO: 753 - protein, 107 aa, synthetic construct; identical to SEQ ID NO: 539
  source 1..107: note = UGX025 light chain variable region sequence

SEQ ID NO: 754 - protein, 447 aa, synthetic construct; identical to SEQ ID NO: 1
  source 1..447: note = UGX026 heavy chain sequence

SEQ ID NO: 755 - protein, 213 aa, synthetic construct; identical to SEQ ID NO: 636
  source 1..213: note = UGX026 light chain sequence

SEQ ID NO: 756 - protein, 117 aa, synthetic construct; identical to SEQ ID NO: 3
  source 1..117: note = UGX026 heavy chain variable region sequence

SEQ ID NO: 757 - protein, 107 aa, synthetic construct; identical to SEQ ID NO: 540
  source 1..107: note = UGX026 light chain variable region sequence

SEQ ID NO: 758 - protein, 447 aa, synthetic construct; identical to SEQ ID NO: 1
  source 1..447: note = UGX027 heavy chain sequence

SEQ ID NO: 759 - protein, 213 aa, synthetic construct; identical to SEQ ID NO: 637
  source 1..213: note = UGX027 light chain sequence

SEQ ID NO: 760 - protein, 117 aa, synthetic construct; identical to SEQ ID NO: 3
  source 1..117: note = UGX027 heavy chain variable region sequence

SEQ ID NO: 761 - protein, 107 aa, synthetic construct; identical to SEQ ID NO: 541
  source 1..107: note = UGX027 light chain variable region sequence

SEQ ID NO: 762 - protein, 447 aa, synthetic construct; identical to SEQ ID NO: 1
  source 1..447: note = UGX028 heavy chain sequence

SEQ ID NO: 763 - protein, 213 aa, synthetic construct; identical to SEQ ID NO: 638
  source 1..213: note = UGX028 light chain sequence

SEQ ID NO: 764 - protein, 117 aa, synthetic construct; identical to SEQ ID NO: 3
  source 1..117: note = UGX028 heavy chain variable region sequence

SEQ ID NO: 765 - protein, 107 aa, synthetic construct; identical to SEQ ID NO: 542
  source 1..107: note = UGX028 light chain variable region sequence

SEQ ID NO: 766 - protein, 447 aa, synthetic construct; identical to SEQ ID NO: 1
  source 1..447: note = UGX029 heavy chain sequence

SEQ ID NO: 767 - protein, 213 aa, synthetic construct; identical to SEQ ID NO: 639
  source 1..213: note = UGX029 light chain sequence

SEQ ID NO: 768 - protein, 117 aa, synthetic construct; identical to SEQ ID NO: 3
  source 1..117: note = UGX029 heavy chain variable region sequence

SEQ ID NO: 769 - protein, 107 aa, synthetic construct; identical to SEQ ID NO: 543
  source 1..107: note = UGX029 light chain variable region sequence

SEQ ID NO: 770 - protein, 447 aa, synthetic construct; identical to SEQ ID NO: 1
  source 1..447: note = UGX030 heavy chain sequence

SEQ ID NO: 771 - protein, 213 aa, synthetic construct; identical to SEQ ID NO: 640
  source 1..213: note = UGX030 light chain sequence

SEQ ID NO: 772 - protein, 117 aa, synthetic construct; identical to SEQ ID NO: 3
  source 1..117: note = UGX030 heavy chain variable region sequence

SEQ ID NO: 773 - protein, 107 aa, synthetic construct; identical to SEQ ID NO: 544
  source 1..107: note = UGX030 light chain variable region sequence

SEQ ID NO: 774 - protein, 447 aa, synthetic construct; identical to SEQ ID NO: 1
  source 1..447: note = UGX031 heavy chain sequence

SEQ ID NO: 775 - protein, 213 aa, synthetic construct; identical to SEQ ID NO: 641
  source 1..213: note = UGX031 light chain sequence

SEQ ID NO: 776 - protein, 117 aa, synthetic construct; identical to SEQ ID NO: 3
  source 1..117: note = UGX031 heavy chain variable region sequence

SEQ ID NO: 777 - protein, 107 aa, synthetic construct; identical to SEQ ID NO: 545
  source 1..107: note = UGX031 light chain variable region sequence

SEQ ID NO: 778 - protein, 447 aa, synthetic construct; identical to SEQ ID NO: 1
  source 1..447: note = UGX032 heavy chain sequence

SEQ ID NO: 779 - protein, 213 aa, synthetic construct; identical to SEQ ID NO: 642
  source 1..213: note = UGX032 light chain sequence

SEQ ID NO: 780 - protein, 117 aa, synthetic construct; identical to SEQ ID NO: 3
  source 1..117: note = UGX032 heavy chain variable region sequence

SEQ ID NO: 781 - protein, 107 aa, synthetic construct; identical to SEQ ID NO: 546
  source 1..107: note = UGX032 light chain variable region sequence

SEQ ID NO: 782 - protein, 447 aa, synthetic construct; identical to SEQ ID NO: 1
  source 1..447: note = UGX033 heavy chain sequence

SEQ ID NO: 783 - protein, 213 aa, synthetic construct; identical to SEQ ID NO: 643
  source 1..213: note = UGX033 light chain sequence

SEQ ID NO: 784 - protein, 117 aa, synthetic construct; identical to SEQ ID NO: 3
  source 1..117: note = UGX033 heavy chain variable region sequence

SEQ ID NO: 785 - protein, 107 aa, synthetic construct; identical to SEQ ID NO: 352
  source 1..107: note = UGX033 light chain variable region sequence

SEQ ID NO: 786 - protein, 447 aa, synthetic construct; identical to SEQ ID NO: 1
  source 1..447: note = UGX034 heavy chain sequence

SEQ ID NO: 787 - protein, 213 aa, synthetic construct; identical to SEQ ID NO: 644
  source 1..213: note = UGX034 light chain sequence

SEQ ID NO: 788 - protein, 117 aa, synthetic construct; identical to SEQ ID NO: 3
  source 1..117: note = UGX034 heavy chain variable region sequence

SEQ ID NO: 789 - protein, 107 aa, synthetic construct; identical to SEQ ID NO: 323
  source 1..107: note = UGX034 light chain variable region sequence

SEQ ID NO: 790 - protein, 447 aa, synthetic construct; identical to SEQ ID NO: 1
  source 1..447: note = UGX035 heavy chain sequence

SEQ ID NO: 791 - protein, 213 aa, synthetic construct; identical to SEQ ID NO: 645
  source 1..213: note = UGX035 light chain sequence

SEQ ID NO: 792 - protein, 117 aa, synthetic construct; identical to SEQ ID NO: 3
  source 1..117: note = UGX035 heavy chain variable region sequence

SEQ ID NO: 793 - protein, 107 aa, synthetic construct; identical to SEQ ID NO: 325
  source 1..107: note = UGX035 light chain variable region sequence

SEQ ID NO: 794 - protein, 447 aa, synthetic construct; identical to SEQ ID NO: 1
  source 1..447: note = UGX036 heavy chain sequence

SEQ ID NO: 795 - protein, 213 aa, synthetic construct; identical to SEQ ID NO: 646
  source 1..213: note = UGX036 light chain sequence

SEQ ID NO: 796 - protein, 117 aa, synthetic construct; identical to SEQ ID NO: 3
  source 1..117: note = UGX036 heavy chain variable region sequence

SEQ ID NO: 797 - protein, 107 aa, synthetic construct; identical to SEQ ID NO: 353
  source 1..107: note = UGX036 light chain variable region sequence

SEQ ID NO: 798 - protein, 447 aa, synthetic construct; identical to SEQ ID NO: 1
  source 1..447: note = UGX037 heavy chain sequence

SEQ ID NO: 799 - protein, 213 aa, synthetic construct; identical to SEQ ID NO: 647
  source 1..213: note = UGX037 light chain sequence

SEQ ID NO: 800 - protein, 117 aa, synthetic construct; identical to SEQ ID NO: 3
  source 1..117: note = UGX037 heavy chain variable region sequence

SEQ ID NO: 801 - protein, 107 aa, synthetic construct; identical to SEQ ID NO: 551
  source 1..107: note = UGX037 light chain variable region sequence

SEQ ID NO: 802 - protein, 447 aa, synthetic construct; identical to SEQ ID NO: 1
  source 1..447: note = UGX038 heavy chain sequence

SEQ ID NO: 803 - protein, 213 aa, synthetic construct; identical to SEQ ID NO: 648
  source 1..213: note = UGX038 light chain sequence

SEQ ID NO: 804 - protein, 117 aa, synthetic construct; identical to SEQ ID NO: 3
  source 1..117: note = UGX038 heavy chain variable region sequence

SEQ ID NO: 805 - protein, 107 aa, synthetic construct; identical to SEQ ID NO: 329
  source 1..107: note = UGX038 light chain variable region sequence

SEQ ID NO: 806 - protein, 447 aa, synthetic construct; identical to SEQ ID NO: 1
  source 1..447: note = UGX039 heavy chain sequence

SEQ ID NO: 807 - protein, 213 aa, synthetic construct; identical to SEQ ID NO: 649
  source 1..213: note = UGX039 light chain sequence

SEQ ID NO: 808 - protein, 117 aa, synthetic construct; identical to SEQ ID NO: 3
  source 1..117: note = UGX039 heavy chain variable region sequence

SEQ ID NO: 809 - protein, 107 aa, synthetic construct; identical to SEQ ID NO: 331
  source 1..107: note = UGX039 light chain variable region sequence

SEQ ID NO: 810 - protein, 447 aa, synthetic construct; identical to SEQ ID NO: 1
  source 1..447: note = UGX040 heavy chain sequence

SEQ ID NO: 811 - protein, 213 aa, synthetic construct; identical to SEQ ID NO: 650
  source 1..213: note = UGX040 light chain sequence

SEQ ID NO: 812 - protein, 117 aa, synthetic construct; identical to SEQ ID NO: 3
  source 1..117: note = UGX040 heavy chain variable region sequence

SEQ ID NO: 813 - protein, 107 aa, synthetic construct; identical to SEQ ID NO: 356
  source 1..107: note = UGX040 light chain variable region sequence

SEQ ID NO: 814 - protein, 447 aa, synthetic construct; identical to SEQ ID NO: 1
  source 1..447: note = UGX041 heavy chain sequence

SEQ ID NO: 815 - protein, 213 aa, synthetic construct; identical to SEQ ID NO: 651
  source 1..213: note = UGX041 light chain sequence

SEQ ID NO: 816 - protein, 117 aa, synthetic construct; identical to SEQ ID NO: 3
  source 1..117: note = UGX041 heavy chain variable region sequence

SEQ ID NO: 817 - protein, 107 aa, synthetic construct; identical to SEQ ID NO: 357
  source 1..107: note = UGX041 light chain variable region sequence

SEQ ID NO: 818 - protein, 447 aa, synthetic construct; identical to SEQ ID NO: 1
  source 1..447: note = UGX042 heavy chain sequence

SEQ ID NO: 819 - protein, 213 aa, synthetic construct; identical to SEQ ID NO: 652
  source 1..213: note = UGX042 light chain sequence

SEQ ID NO: 820 - protein, 117 aa, synthetic construct; identical to SEQ ID NO: 3
  source 1..117: note = UGX042 heavy chain variable region sequence

SEQ ID NO: 821 - protein, 107 aa, synthetic construct; identical to SEQ ID NO: 341
  source 1..107: note = UGX042 light chain variable region sequence

SEQ ID NO: 822 - protein, 447 aa, synthetic construct; identical to SEQ ID NO: 1
  source 1..447: note = UGX043 heavy chain sequence

SEQ ID NO: 823 - protein, 213 aa, synthetic construct; identical to SEQ ID NO: 653
  source 1..213: note = UGX043 light chain sequence

SEQ ID NO: 824 - protein, 117 aa, synthetic construct; identical to SEQ ID NO: 3
  source 1..117: note = UGX043 heavy chain variable region sequence

SEQ ID NO: 825 - protein, 107 aa, synthetic construct; identical to SEQ ID NO: 557
  source 1..107: note = UGX043 light chain variable region sequence

SEQ ID NO: 826 - protein, 447 aa, synthetic construct; identical to SEQ ID NO: 558
  source 1..447: note = UGX044 heavy chain sequence

SEQ ID NO: 827 - protein, 213 aa, synthetic construct; identical to SEQ ID NO: 2
  source 1..213: note = UGX044 light chain sequence

SEQ ID NO: 828 - protein, 117 aa, synthetic construct; identical to SEQ ID NO: 462
  source 1..117: note = UGX044 heavy chain variable region sequence

SEQ ID NO: 829 - protein, 107 aa, synthetic construct; identical to SEQ ID NO: 4
  source 1..107: note = UGX044 light chain variable region sequence

SEQ ID NO: 830 - protein, 447 aa, synthetic construct; identical to SEQ ID NO: 559
  source 1..447: note = UGX045 heavy chain sequence

SEQ ID NO: 831 - protein, 213 aa, synthetic construct; identical to SEQ ID NO: 2
  source 1..213: note = UGX045 light chain sequence

SEQ ID NO: 832 - protein, 117 aa, synthetic construct; identical to SEQ ID NO: 463
  source 1..117: note = UGX045 heavy chain variable region sequence

SEQ ID NO: 833 - protein, 107 aa, synthetic construct; identical to SEQ ID NO: 4
  source 1..107: note = UGX045 light chain variable region sequence

SEQ ID NO: 834 - protein, 447 aa, synthetic construct; identical to SEQ ID NO: 560
  source 1..447: note = UGX046 heavy chain sequence

SEQ ID NO: 835 - protein, 213 aa, synthetic construct; identical to SEQ ID NO: 2
  source 1..213: note = UGX046 light chain sequence

SEQ ID NO: 836 - protein, 117 aa, synthetic construct; identical to SEQ ID NO: 464
  source 1..117: note = UGX046 heavy chain variable region sequence

SEQ ID NO: 837 - protein, 107 aa, synthetic construct; identical to SEQ ID NO: 4
  source 1..107: note = UGX046 light chain variable region sequence

SEQ ID NO: 838 - protein, 447 aa, synthetic construct; identical to SEQ ID NO: 561
  source 1..447: note = UGX047 heavy chain sequence

SEQ ID NO: 839 - protein, 213 aa, synthetic construct; identical to SEQ ID NO: 2
  source 1..213: note = UGX047 light chain sequence

SEQ ID NO: 840 - protein, 117 aa, synthetic construct; identical to SEQ ID NO: 465
  source 1..117: note = UGX047 heavy chain variable region sequence

SEQ ID NO: 841 - protein, 107 aa, synthetic construct; identical to SEQ ID NO: 4
  source 1..107: note = UGX047 light chain variable region sequence

SEQ ID NO: 842 - protein, 447 aa, synthetic construct; identical to SEQ ID NO: 562
  source 1..447: note = UGX048 heavy chain sequence

SEQ ID NO: 843 - protein, 213 aa, synthetic construct; identical to SEQ ID NO: 2
  source 1..213: note = UGX048 light chain sequence

SEQ ID NO: 844 - protein, 117 aa, synthetic construct; identical to SEQ ID NO: 466
  source 1..117: note = UGX048 heavy chain variable region sequence

SEQ ID NO: 845 - protein, 107 aa, synthetic construct; identical to SEQ ID NO: 4
  source 1..107: note = UGX048 light chain variable region sequence

SEQ ID NO: 846 - protein, 447 aa, synthetic construct; identical to SEQ ID NO: 563
  source 1..447: note = UGX049 heavy chain sequence

SEQ ID NO: 847 - protein, 213 aa, synthetic construct; identical to SEQ ID NO: 2
  source 1..213: note = UGX049 light chain sequence

SEQ ID NO: 848 - protein, 117 aa, synthetic construct; identical to SEQ ID NO: 467
  source 1..117: note = UGX049 heavy chain variable region sequence

SEQ ID NO: 849 - protein, 107 aa, synthetic construct; identical to SEQ ID NO: 4
  source 1..107: note = UGX049 light chain variable region sequence

SEQ ID NO: 850 - protein, 447 aa, synthetic construct; identical to SEQ ID NO: 564
  source 1..447: note = UGX050 heavy chain sequence

SEQ ID NO: 851 - protein, 213 aa, synthetic construct; identical to SEQ ID NO: 2
  source 1..213: note = UGX050 light chain sequence

SEQ ID NO: 852 - protein, 117 aa, synthetic construct; identical to SEQ ID NO: 468
  source 1..117: note = UGX050 heavy chain variable region sequence

SEQ ID NO: 853 - protein, 107 aa, synthetic construct; identical to SEQ ID NO: 4
  source 1..107: note = UGX050 light chain variable region sequence

SEQ ID NO: 854 - protein, 447 aa, synthetic construct; identical to SEQ ID NO: 565
  source 1..447: note = UGX051 heavy chain sequence

SEQ ID NO: 855 - protein, 213 aa, synthetic construct; identical to SEQ ID NO: 2
  source 1..213: note = UGX051 light chain sequence

SEQ ID NO: 856 - protein, 117 aa, synthetic construct; identical to SEQ ID NO: 249
  source 1..117: note = UGX051 heavy chain variable region sequence

SEQ ID NO: 857 - protein, 107 aa, synthetic construct; identical to SEQ ID NO: 4
  source 1..107: note = UGX051 light chain variable region sequence

SEQ ID NO: 858 - protein, 447 aa, synthetic construct; identical to SEQ ID NO: 566
  source 1..447: note = UGX052 heavy chain sequence

SEQ ID NO: 859 - protein, 213 aa, synthetic construct; identical to SEQ ID NO: 2
  source 1..213: note = UGX052 light chain sequence

SEQ ID NO: 860 - protein, 117 aa, synthetic construct; identical to SEQ ID NO: 250
  source 1..117: note = UGX052 heavy chain variable region sequence

SEQ ID NO: 861 - protein, 107 aa, synthetic construct; identical to SEQ ID NO: 4
  source 1..107: note = UGX052 light chain variable region sequence

SEQ ID NO: 862 - protein, 447 aa, synthetic construct; identical to SEQ ID NO: 567
  source 1..447: note = UGX053 heavy chain sequence

SEQ ID NO: 863 - protein, 213 aa, synthetic construct; identical to SEQ ID NO: 2
  source 1..213: note = UGX053 light chain sequence

SEQ ID NO: 864 - protein, 117 aa, synthetic construct; identical to SEQ ID NO: 471
  source 1..117: note = UGX053 heavy chain variable region sequence

SEQ ID NO: 865 - protein, 107 aa, synthetic construct; identical to SEQ ID NO: 4
  source 1..107: note = UGX053 light chain variable region sequence

SEQ ID NO: 866 - protein, 447 aa, synthetic construct; identical to SEQ ID NO: 568
  source 1..447: note = UGX054 heavy chain sequence

SEQ ID NO: 867 - protein, 213 aa, synthetic construct; identical to SEQ ID NO: 2
  source 1..213: note = UGX054 light chain sequence

SEQ ID NO: 868 - protein, 117 aa, synthetic construct; identical to SEQ ID NO: 257
  source 1..117: note = UGX054 heavy chain variable region sequence

SEQ ID NO: 869 - protein, 107 aa, synthetic construct; identical to SEQ ID NO: 4
  source 1..107: note = UGX054 light chain variable region sequence

SEQ ID NO: 870 - protein, 447 aa, synthetic construct; identical to SEQ ID NO: 569
  source 1..447: note = UGX055 heavy chain sequence

SEQ ID NO: 871 - protein, 213 aa, synthetic construct; identical to SEQ ID NO: 2
  source 1..213: note = UGX055 light chain sequence

SEQ ID NO: 872 - protein, 117 aa, synthetic construct; identical to SEQ ID NO: 258
  source 1..117: note = UGX055 heavy chain variable region sequence

SEQ ID NO: 873 - protein, 107 aa, synthetic construct; identical to SEQ ID NO: 4
  source 1..107: note = UGX055 light chain variable region sequence

SEQ ID NO: 874 - protein, 447 aa, synthetic construct; identical to SEQ ID NO: 570
  source 1..447: note = UGX056 heavy chain sequence

SEQ ID NO: 875 - protein, 213 aa, synthetic construct; identical to SEQ ID NO: 2
  source 1..213: note = UGX056 light chain sequence

SEQ ID NO: 876 - protein, 117 aa, synthetic construct; identical to SEQ ID NO: 474
  source 1..117: note = UGX056 heavy chain variable region sequence

SEQ ID NO: 877 - protein, 107 aa, synthetic construct; identical to SEQ ID NO: 4
  source 1..107: note = UGX056 light chain variable region sequence

SEQ ID NO: 878 - protein, 447 aa, synthetic construct; identical to SEQ ID NO: 571
  source 1..447: note = UGX057 heavy chain sequence

SEQ ID NO: 879 - protein, 213 aa, synthetic construct; identical to SEQ ID NO: 2
  source 1..213: note = UGX057 light chain sequence

SEQ ID NO: 880 - protein, 117 aa, synthetic construct; identical to SEQ ID NO: 259
  source 1..117: note = UGX057 heavy chain variable region sequence

SEQ ID NO: 881 - protein, 107 aa, synthetic construct; identical to SEQ ID NO: 4
  source 1..107: note = UGX057 light chain variable region sequence

SEQ ID NO: 882 - protein, 447 aa, synthetic construct; identical to SEQ ID NO: 572
  source 1..447: note = UGX058 heavy chain sequence

SEQ ID NO: 883 - protein, 213 aa, synthetic construct; identical to SEQ ID NO: 2
  source 1..213: note = UGX058 light chain sequence

SEQ ID NO: 884 - protein, 117 aa, synthetic construct; identical to SEQ ID NO: 476
  source 1..117: note = UGX058 heavy chain variable region sequence

SEQ ID NO: 885 - protein, 107 aa, synthetic construct; identical to SEQ ID NO: 4
  source 1..107: note = UGX058 light chain variable region sequence

SEQ ID NO: 886 - protein, 447 aa, synthetic construct; identical to SEQ ID NO: 573
  source 1..447: note = UGX059 heavy chain sequence

SEQ ID NO: 887 - protein, 213 aa, synthetic construct; identical to SEQ ID NO: 2
  source 1..213: note = UGX059 light chain sequence

SEQ ID NO: 888 - protein, 117 aa, synthetic construct; identical to SEQ ID NO: 264
  source 1..117: note = UGX059 heavy chain variable region sequence

SEQ ID NO: 889 - protein, 107 aa, synthetic construct; identical to SEQ ID NO: 4
  source 1..107: note = UGX059 light chain variable region sequence

SEQ ID NO: 890 - protein, 447 aa, synthetic construct; identical to SEQ ID NO: 574
  source 1..447: note = UGX060 heavy chain sequence

SEQ ID NO: 891 - protein, 213 aa, synthetic construct; identical to SEQ ID NO: 2
  source 1..213: note = UGX060 light chain sequence

SEQ ID NO: 892 - protein, 117 aa, synthetic construct; identical to SEQ ID NO: 478
  source 1..117: note = UGX060 heavy chain variable region sequence

SEQ ID NO: 893 - protein, 107 aa, synthetic construct; identical to SEQ ID NO: 4
  source 1..107: note = UGX060 light chain variable region sequence

SEQ ID NO: 894 - protein, 447 aa, synthetic construct; identical to SEQ ID NO: 575
  source 1..447: note = UGX061 heavy chain sequence

SEQ ID NO: 895 - protein, 213 aa, synthetic construct; identical to SEQ ID NO: 2
  source 1..213: note = UGX061 light chain sequence

SEQ ID NO: 896 - protein, 117 aa, synthetic construct; identical to SEQ ID NO: 479
  source 1..117: note = UGX061 heavy chain variable region sequence

SEQ ID NO: 897 - protein, 107 aa, synthetic construct; identical to SEQ ID NO: 4
  source 1..107: note = UGX061 light chain variable region sequence

SEQ ID NO: 898 - protein, 447 aa, synthetic construct; identical to SEQ ID NO: 576
  source 1..447: note = UGX062 heavy chain sequence

SEQ ID NO: 899 - protein, 213 aa, synthetic construct; identical to SEQ ID NO: 2
  source 1..213: note = UGX062 light chain sequence

SEQ ID NO: 900 - protein, 117 aa, synthetic construct; identical to SEQ ID NO: 480
  source 1..117: note = UGX062 heavy chain variable region sequence

SEQ ID NO: 901 - protein, 107 aa, synthetic construct; identical to SEQ ID NO: 4
  source 1..107: note = UGX062 light chain variable region sequence

SEQ ID NO: 902 - protein, 447 aa, synthetic construct; identical to SEQ ID NO: 577
  source 1..447: note = UGX063 heavy chain sequence

SEQ ID NO: 903 - protein, 213 aa, synthetic construct; identical to SEQ ID NO: 2
  source 1..213: note = UGX063 light chain sequence

SEQ ID NO: 904 - protein, 117 aa, synthetic construct; identical to SEQ ID NO: 481
  source 1..117: note = UGX063 heavy chain variable region sequence

SEQ ID NO: 905 - protein, 107 aa, synthetic construct; identical to SEQ ID NO: 4
  source 1..107: note = UGX063 light chain variable region sequence

SEQ ID NO: 906 - protein, 447 aa, synthetic construct; identical to SEQ ID NO: 578
  source 1..447: note = UGX064 heavy chain sequence

SEQ ID NO: 907 - protein, 213 aa, synthetic construct; identical to SEQ ID NO: 2
  source 1..213: note = UGX064 light chain sequence

SEQ ID NO: 908 - protein, 117 aa, synthetic construct; identical to SEQ ID NO: 482
  source 1..117: note = UGX064 heavy chain variable region sequence

SEQ ID NO: 909 - protein, 107 aa, synthetic construct; identical to SEQ ID NO: 4
  source 1..107: note = UGX064 light chain variable region sequence

SEQ ID NO: 910 - protein, 447 aa, synthetic construct; identical to SEQ ID NO: 579
  source 1..447: note = UGX065 heavy chain sequence

SEQ ID NO: 911 - protein, 213 aa, synthetic construct; identical to SEQ ID NO: 2
  source 1..213: note = UGX065 light chain sequence

SEQ ID NO: 912 - protein, 117 aa, synthetic construct; identical to SEQ ID NO: 483
  source 1..117: note = UGX065 heavy chain variable region sequence

SEQ ID NO: 913 - protein, 107 aa, synthetic construct; identical to SEQ ID NO: 4
  source 1..107: note = UGX065 light chain variable region sequence

SEQ ID NO: 914 - protein, 447 aa, synthetic construct; identical to SEQ ID NO: 580
  source 1..447: note = UGX066 heavy chain sequence

SEQ ID NO: 915 - protein, 213 aa, synthetic construct; identical to SEQ ID NO: 2
  source 1..213: note = UGX066 light chain sequence

SEQ ID NO: 916 - protein, 117 aa, synthetic construct; identical to SEQ ID NO: 216
  source 1..117: note = UGX066 heavy chain variable region sequence

SEQ ID NO: 917 - protein, 107 aa, synthetic construct; identical to SEQ ID NO: 4
  source 1..107: note = UGX066 light chain variable region sequence

SEQ ID NO: 918 - protein, 447 aa, synthetic construct; identical to SEQ ID NO: 581
  source 1..447: note = UGX067 heavy chain sequence

SEQ ID NO: 919 - protein, 213 aa, synthetic construct; identical to SEQ ID NO: 2
  source 1..213: note = UGX067 light chain sequence

SEQ ID NO: 920 - protein, 117 aa, synthetic construct; identical to SEQ ID NO: 485
  source 1..117: note = UGX067 heavy chain variable region sequence

SEQ ID NO: 921 - protein, 107 aa, synthetic construct; identical to SEQ ID NO: 4
  source 1..107: note = UGX067 light chain variable region sequence

SEQ ID NO: 922 - protein, 447 aa, synthetic construct; identical to SEQ ID NO: 582
  source 1..447: note = UGX068 heavy chain sequence

SEQ ID NO: 923 - protein, 213 aa, synthetic construct; identical to SEQ ID NO: 2
  source 1..213: note = UGX068 light chain sequence

SEQ ID NO: 924 - protein, 117 aa, synthetic construct; identical to SEQ ID NO: 228
  source 1..117: note = UGX068 heavy chain variable region sequence

SEQ ID NO: 925 - protein, 107 aa, synthetic construct; identical to SEQ ID NO: 4
  source 1..107: note = UGX068 light chain variable region sequence

SEQ ID NO: 926 - protein, 447 aa, synthetic construct; identical to SEQ ID NO: 583
  source 1..447: note = UGX069 heavy chain sequence

SEQ ID NO: 927 - protein, 213 aa, synthetic construct; identical to SEQ ID NO: 2
  source 1..213: note = UGX069 light chain sequence

SEQ ID NO: 928 - protein, 117 aa, synthetic construct; identical to SEQ ID NO: 487
  source 1..117: note = UGX069 heavy chain variable region sequence

SEQ ID NO: 929 - protein, 107 aa, synthetic construct; identical to SEQ ID NO: 4
  source 1..107: note = UGX069 light chain variable region sequence

SEQ ID NO: 930 - protein, 447 aa, synthetic construct; identical to SEQ ID NO: 584
  source 1..447: note = UGX070 heavy chain sequence

SEQ ID NO: 931 - protein, 213 aa, synthetic construct; identical to SEQ ID NO: 2
  source 1..213: note = UGX070 light chain sequence

SEQ ID NO: 932 - protein, 117 aa, synthetic construct; identical to SEQ ID NO: 488
  source 1..117: note = UGX070 heavy chain variable region sequence

SEQ ID NO: 933 - protein, 107 aa, synthetic construct; identical to SEQ ID NO: 4
  source 1..107: note = UGX070 light chain variable region sequence

SEQ ID NO: 934 - protein, 447 aa, synthetic construct; identical to SEQ ID NO: 585
  source 1..447: note = UGX071 heavy chain sequence

SEQ ID NO: 935 - protein, 213 aa, synthetic construct; identical to SEQ ID NO: 2
  source 1..213: note = UGX071 light chain sequence

SEQ ID NO: 936 - protein, 117 aa, synthetic construct; identical to SEQ ID NO: 489
  source 1..117: note = UGX071 heavy chain variable region sequence

SEQ ID NO: 937 - protein, 107 aa, synthetic construct; identical to SEQ ID NO: 4
  source 1..107: note = UGX071 light chain variable region sequence

SEQ ID NO: 938 - protein, 447 aa, synthetic construct; identical to SEQ ID NO: 586
  source 1..447: note = UGX072 heavy chain sequence

SEQ ID NO: 939 - protein, 213 aa, synthetic construct; identical to SEQ ID NO: 2
  source 1..213: note = UGX072 light chain sequence

SEQ ID NO: 940 - protein, 117 aa, synthetic construct; identical to SEQ ID NO: 490
  source 1..117: note = UGX072 heavy chain variable region sequence

SEQ ID NO: 941 - protein, 107 aa, synthetic construct; identical to SEQ ID NO: 4
  source 1..107: note = UGX072 light chain variable region sequence

SEQ ID NO: 942 - protein, 447 aa, synthetic construct; identical to SEQ ID NO: 587
  source 1..447: note = UGX073 heavy chain sequence

SEQ ID NO: 943 - protein, 213 aa, synthetic construct; identical to SEQ ID NO: 2
  source 1..213: note = UGX073 light chain sequence

SEQ ID NO: 944 - protein, 117 aa, synthetic construct; identical to SEQ ID NO: 491
  source 1..117: note = UGX073 heavy chain variable region sequence

SEQ ID NO: 945 - protein, 107 aa, synthetic construct; identical to SEQ ID NO: 4
  source 1..107: note = UGX073 light chain variable region sequence

SEQ ID NO: 946 - protein, 447 aa, synthetic construct; identical to SEQ ID NO: 588
  source 1..447: note = UGX074 heavy chain sequence

SEQ ID NO: 947 - protein, 213 aa, synthetic construct; identical to SEQ ID NO: 2
  source 1..213: note = UGX074 light chain sequence

SEQ ID NO: 948 - protein, 117 aa, synthetic construct; identical to SEQ ID NO: 492
  source 1..117: note = UGX074 heavy chain variable region sequence

SEQ ID NO: 949 - protein, 107 aa, synthetic construct; identical to SEQ ID NO: 4
  source 1..107: note = UGX074 light chain variable region sequence

SEQ ID NO: 950 - protein, 447 aa, synthetic construct; identical to SEQ ID NO: 589
  source 1..447: note = UGX075 heavy chain sequence

SEQ ID NO: 951 - protein, 213 aa, synthetic construct; identical to SEQ ID NO: 2
  source 1..213: note = UGX075 light chain sequence

SEQ ID NO: 952 - protein, 117 aa, synthetic construct; identical to SEQ ID NO: 493
  source 1..117: note = UGX075 heavy chain variable region sequence

SEQ ID NO: 953 - protein, 107 aa, synthetic construct; identical to SEQ ID NO: 4
  source 1..107: note = UGX075 light chain variable region sequence

SEQ ID NO: 954 - protein, 447 aa, synthetic construct; identical to SEQ ID NO: 590
  source 1..447: note = UGX076 heavy chain sequence

SEQ ID NO: 955 - protein, 213 aa, synthetic construct; identical to SEQ ID NO: 2
  source 1..213: note = UGX076 light chain sequence

SEQ ID NO: 956 - protein, 117 aa, synthetic construct; identical to SEQ ID NO: 494
  source 1..117: note = UGX076 heavy chain variable region sequence

SEQ ID NO: 957 - protein, 107 aa, synthetic construct; identical to SEQ ID NO: 4
  source 1..107: note = UGX076 light chain variable region sequence

SEQ ID NO: 958 - protein, 447 aa, synthetic construct; identical to SEQ ID NO: 591
  source 1..447: note = UGX077 heavy chain sequence

SEQ ID NO: 959 - protein, 213 aa, synthetic construct; identical to SEQ ID NO: 2
  source 1..213: note = UGX077 light chain sequence

SEQ ID NO: 960 - protein, 117 aa, synthetic construct; identical to SEQ ID NO: 495
  source 1..117: note = UGX077 heavy chain variable region sequence

SEQ ID NO: 961 - protein, 107 aa, synthetic construct; identical to SEQ ID NO: 4
  source 1..107: note = UGX077 light chain variable region sequence

SEQ ID NO: 962 - protein, 447 aa, synthetic construct; identical to SEQ ID NO: 592
  source 1..447: note = UGX078 heavy chain sequence

SEQ ID NO: 963 - protein, 213 aa, synthetic construct; identical to SEQ ID NO: 2
  source 1..213: note = UGX078 light chain sequence

SEQ ID NO: 964 - protein, 117 aa, synthetic construct; identical to SEQ ID NO: 496
  source 1..117: note = UGX078 heavy chain variable region sequence

SEQ ID NO: 965 - protein, 107 aa, synthetic construct; identical to SEQ ID NO: 4
  source 1..107: note = UGX078 light chain variable region sequence

SEQ ID NO: 966 - protein, 447 aa, synthetic construct; identical to SEQ ID NO: 593
  source 1..447: note = UGX079 heavy chain sequence

SEQ ID NO: 967 - protein, 213 aa, synthetic construct; identical to SEQ ID NO: 2
  source 1..213: note = UGX079 light chain sequence

SEQ ID NO: 968 - protein, 117 aa, synthetic construct; identical to SEQ ID NO: 497
  source 1..117: note = UGX079 heavy chain variable region sequence

SEQ ID NO: 969 - protein, 107 aa, synthetic construct; identical to SEQ ID NO: 4
  source 1..107: note = UGX079 light chain variable region sequence

SEQ ID NO: 970 - protein, 447 aa, synthetic construct; identical to SEQ ID NO: 594
  source 1..447: note = UGX080 heavy chain sequence

SEQ ID NO: 971 - protein, 213 aa, synthetic construct; identical to SEQ ID NO: 2
  source 1..213: note = UGX080 light chain sequence

SEQ ID NO: 972 - protein, 117 aa, synthetic construct; identical to SEQ ID NO: 498
  source 1..117: note = UGX080 heavy chain variable region sequence

SEQ ID NO: 973 - protein, 107 aa, synthetic construct; identical to SEQ ID NO: 4
  source 1..107: note = UGX080 light chain variable region sequence

SEQ ID NO: 974 - protein, 447 aa, synthetic construct; identical to SEQ ID NO: 595
  source 1..447: note = UGX081 heavy chain sequence

SEQ ID NO: 975 - protein, 213 aa, synthetic construct; identical to SEQ ID NO: 2
  source 1..213: note = UGX081 light chain sequence

SEQ ID NO: 976 - protein, 117 aa, synthetic construct; identical to SEQ ID NO: 499
  source 1..117: note = UGX081 heavy chain variable region sequence

SEQ ID NO: 977 - protein, 107 aa, synthetic construct; identical to SEQ ID NO: 4
  source 1..107: note = UGX081 light chain variable region sequence

SEQ ID NO: 978 - protein, 447 aa, synthetic construct; identical to SEQ ID NO: 596
  source 1..447: note = UGX082 heavy chain sequence

SEQ ID NO: 979 - protein, 213 aa, synthetic construct; identical to SEQ ID NO: 2
  source 1..213: note = UGX082 light chain sequence

SEQ ID NO: 980 - protein, 117 aa, synthetic construct; identical to SEQ ID NO: 500
  source 1..117: note = UGX082 heavy chain variable region sequence

SEQ ID NO: 981 - protein, 107 aa, synthetic construct; identical to SEQ ID NO: 4
  source 1..107: note = UGX082 light chain variable region sequence

SEQ ID NO: 982 - protein, 447 aa, synthetic construct; identical to SEQ ID NO: 597
  source 1..447: note = UGX083 heavy chain sequence

SEQ ID NO: 983 - protein, 213 aa, synthetic construct; identical to SEQ ID NO: 2
  source 1..213: note = UGX083 light chain sequence

SEQ ID NO: 984 - protein, 117 aa, synthetic construct; identical to SEQ ID NO: 188
  source 1..117: note = UGX083 heavy chain variable region sequence

SEQ ID NO: 985 - protein, 107 aa, synthetic construct; identical to SEQ ID NO: 4
  source 1..107: note = UGX083 light chain variable region sequence

SEQ ID NO: 986 - protein, 447 aa, synthetic construct; identical to SEQ ID NO: 598
  source 1..447: note = UGX084 heavy chain sequence

SEQ ID NO: 987 - protein, 213 aa, synthetic construct; identical to SEQ ID NO: 2
  source 1..213: note = UGX084 light chain sequence

SEQ ID NO: 988 - protein, 117 aa, synthetic construct; identical to SEQ ID NO: 232
  source 1..117: note = UGX084 heavy chain variable region sequence

SEQ ID NO: 989 - protein, 107 aa, synthetic construct; identical to SEQ ID NO: 4
  source 1..107: note = UGX084 light chain variable region sequence

SEQ ID NO: 990 - protein, 447 aa, synthetic construct; identical to SEQ ID NO: 599
  source 1..447: note = UGX085 heavy chain sequence

SEQ ID NO: 991 - protein, 213 aa, synthetic construct; identical to SEQ ID NO: 2
  source 1..213: note = UGX085 light chain sequence

SEQ ID NO: 992 - protein, 117 aa, synthetic construct; identical to SEQ ID NO: 234
  source 1..117: note = UGX085 heavy chain variable region sequence

SEQ ID NO: 993 - protein, 107 aa, synthetic construct; identical to SEQ ID NO: 4
  source 1..107: note = UGX085 light chain variable region sequence

SEQ ID NO: 994 - protein, 447 aa, synthetic construct; identical to SEQ ID NO: 600
  source 1..447: note = UGX086 heavy chain sequence

SEQ ID NO: 995 - protein, 213 aa, synthetic construct; identical to SEQ ID NO: 2
  source 1..213: note = UGX086 light chain sequence

SEQ ID NO: 996 - protein, 117 aa, synthetic construct; identical to SEQ ID NO: 192
  source 1..117: note = UGX086 heavy chain variable region sequence

SEQ ID NO: 997 - protein, 107 aa, synthetic construct; identical to SEQ ID NO: 4
  source 1..107: note = UGX086 light chain variable region sequence

SEQ ID NO: 998 - protein, 447 aa, synthetic construct; identical to SEQ ID NO: 601
  source 1..447: note = UGX087 heavy chain sequence

SEQ ID NO: 999 - protein, 213 aa, synthetic construct; identical to SEQ ID NO: 2
  source 1..213: note = UGX087 light chain sequence

SEQ ID NO: 1000 - protein, 117 aa, synthetic construct; identical to SEQ ID NO: 505
  source 1..117: note = UGX087 heavy chain variable region sequence

SEQ ID NO: 1001 - protein, 107 aa, synthetic construct; identical to SEQ ID NO: 4
  source 1..107: note = UGX087 light chain variable region sequence

SEQ ID NO: 1002 - protein, 447 aa, synthetic construct; identical to SEQ ID NO: 602
  source 1..447: note = UGX088 heavy chain sequence

SEQ ID NO: 1003 - protein, 213 aa, synthetic construct; identical to SEQ ID NO: 2
  source 1..213: note = UGX088 light chain sequence

SEQ ID NO: 1004 - protein, 117 aa, synthetic construct; identical to SEQ ID NO: 236
  source 1..117: note = UGX088 heavy chain variable region sequence

SEQ ID NO: 1005 - protein, 107 aa, synthetic construct; identical to SEQ ID NO: 4
  source 1..107: note = UGX088 light chain variable region sequence

SEQ ID NO: 1006 - protein, 447 aa, synthetic construct; identical to SEQ ID NO: 603
  source 1..447: note = UGX089 heavy chain sequence

SEQ ID NO: 1007 - protein, 213 aa, synthetic construct; identical to SEQ ID NO: 2
  source 1..213: note = UGX089 light chain sequence

SEQ ID NO: 1008 - protein, 117 aa, synthetic construct; identical to SEQ ID NO: 240
  source 1..117: note = UGX089 heavy chain variable region sequence

SEQ ID NO: 1009 - protein, 107 aa, synthetic construct; identical to SEQ ID NO: 4
  source 1..107: note = UGX089 light chain variable region sequence

SEQ ID NO: 1010 - protein, 447 aa, synthetic construct; identical to SEQ ID NO: 604
  source 1..447: note = UGX090 heavy chain sequence

SEQ ID NO: 1011 - protein, 213 aa, synthetic construct; identical to SEQ ID NO: 2
  source 1..213: note = UGX090 light chain sequence

SEQ ID NO: 1012 - protein, 117 aa, synthetic construct; identical to SEQ ID NO: 508
  source 1..117: note = UGX090 heavy chain variable region sequence

SEQ ID NO: 1013 - protein, 107 aa, synthetic construct; identical to SEQ ID NO: 4
  source 1..107: note = UGX090 light chain variable region sequence

SEQ ID NO: 1014 - protein, 447 aa, synthetic construct; identical to SEQ ID NO: 605
  source 1..447: note = UGX091 heavy chain sequence

SEQ ID NO: 1015 - protein, 213 aa, synthetic construct; identical to SEQ ID NO: 2
  source 1..213: note = UGX091 light chain sequence

SEQ ID NO: 1016 - protein, 117 aa, synthetic construct; identical to SEQ ID NO: 509
  source 1..117: note = UGX091 heavy chain variable region sequence

SEQ ID NO: 1017 - protein, 107 aa, synthetic construct; identical to SEQ ID NO: 4
  source 1..107: note = UGX091 light chain variable region sequence

SEQ ID NO: 1018 - protein, 447 aa, synthetic construct; identical to SEQ ID NO: 606
  source 1..447: note = UGX092 heavy chain sequence

SEQ ID NO: 1019 - protein, 213 aa, synthetic construct; identical to SEQ ID NO: 2
  source 1..213: note = UGX092 light chain sequence

SEQ ID NO: 1020 - protein, 117 aa, synthetic construct; identical to SEQ ID NO: 195
  source 1..117: note = UGX092 heavy chain variable region sequence

SEQ ID NO: 1021 - protein, 107 aa, synthetic construct; identical to SEQ ID NO: 4
  source 1..107: note = UGX092 light chain variable region sequence

SEQ ID NO: 1022 - protein, 447 aa, synthetic construct; identical to SEQ ID NO: 607
  source 1..447: note = UGX093 heavy chain sequence

SEQ ID NO: 1023 - protein, 213 aa, synthetic construct; identical to SEQ ID NO: 2
  source 1..213: note = UGX093 light chain sequence

SEQ ID NO: 1024 - protein, 117 aa, synthetic construct; identical to SEQ ID NO: 196
  source 1..117: note = UGX093 heavy chain variable region sequence

SEQ ID NO: 1025 - protein, 107 aa, synthetic construct; identical to SEQ ID NO: 4
  source 1..107: note = UGX093 light chain variable region sequence

SEQ ID NO: 1026 - protein, 447 aa, synthetic construct; identical to SEQ ID NO: 608
  source 1..447: note = UGX094 heavy chain sequence

SEQ ID NO: 1027 - protein, 213 aa, synthetic construct; identical to SEQ ID NO: 2
  source 1..213: note = UGX094 light chain sequence

SEQ ID NO: 1028 - protein, 117 aa, synthetic construct; identical to SEQ ID NO: 512
  source 1..117: note = UGX094 heavy chain variable region sequence

SEQ ID NO: 1029 - protein, 107 aa, synthetic construct; identical to SEQ ID NO: 4
  source 1..107: note = UGX094 light chain variable region sequence

SEQ ID NO: 1030 - protein, 447 aa, synthetic construct; identical to SEQ ID NO: 609
  source 1..447: note = UGX095 heavy chain sequence

SEQ ID NO: 1031 - protein, 213 aa, synthetic construct; identical to SEQ ID NO: 2
  source 1..213: note = UGX095 light chain sequence

SEQ ID NO: 1032 - protein, 117 aa, synthetic construct; identical to SEQ ID NO: 513
  source 1..117: note = UGX095 heavy chain variable region sequence

SEQ ID NO: 1033 - protein, 107 aa, synthetic construct; identical to SEQ ID NO: 4
  source 1..107: note = UGX095 light chain variable region sequence

SEQ ID NO: 1034 - protein, 447 aa, synthetic construct; identical to SEQ ID NO: 610
  source 1..447: note = UGX096 heavy chain sequence

SEQ ID NO: 1035 - protein, 213 aa, synthetic construct; identical to SEQ ID NO: 2
  source 1..213: note = UGX096 light chain sequence

SEQ ID NO: 1036 - protein, 117 aa, synthetic construct; identical to SEQ ID NO: 200
  source 1..117: note = UGX096 heavy chain variable region sequence

SEQ ID NO: 1037 - protein, 107 aa, synthetic construct; identical to SEQ ID NO: 4
  source 1..107: note = UGX096 light chain variable region sequence

SEQ ID NO: 1038 - protein, 447 aa, synthetic construct; identical to SEQ ID NO: 1
  source 1..447: note = UGX101 heavy chain sequence

SEQ ID NO: 1039 - protein, 213 aa, synthetic construct
  source 1..213: note = UGX101 light chain sequence
AIQLTQSPSSLSASVGDRVTITCRASQGFSSALVWYQQKPGKAPKLLIYDASSLESGVPSRFSGSGSGTDFTLTISSLQPEDFATYYCQQFNDYFTFGPGTKVDIKRTVAAPSVFIFPPSDEQLKSGTASVVCLLNNFYPREAKVQWKVDNALQSGNSQESVTEQDSKDSTYSLSSTLTLSKADYEKHKVYACEVTHQGLSSPVTKSFNRGEC

SEQ ID NO: 1040 - protein, 117 aa, synthetic construct; identical to SEQ ID NO: 3
  source 1..117: note = UGX101 heavy chain variable region sequence

SEQ ID NO: 1041 - protein, 107 aa, synthetic construct; identical to SEQ ID NO: 271
  source 1..107: note = UGX101 light chain variable region sequence

SEQ ID NO: 1042 - protein, 447 aa, synthetic construct; identical to SEQ ID NO: 1
  source 1..447: note = UGX102 heavy chain sequence

SEQ ID NO: 1043 - protein, 213 aa, synthetic construct
  source 1..213: note = UGX102 light chain sequence
AIQLTQSPSSLSASVGDRVTITCRASQGLSSALVWYQQKPGKAPKLLIYDASSLESGVPSRFSGSGSGTDFTLTISSLQPEDFATYYCQQFNDYFTFGPGTKVDIKRTVAAPSVFIFPPSDEQLKSGTASVVCLLNNFYPREAKVQWKVDNALQSGNSQESVTEQDSKDSTYSLSSTLTLSKADYEKHKVYACEVTHQGLSSPVTKSFNRGEC

SEQ ID NO: 1044 - protein, 117 aa, synthetic construct; identical to SEQ ID NO: 3
  source 1..117: note = UGX102 heavy chain variable region sequence

SEQ ID NO: 1045 - protein, 107 aa, synthetic construct; identical to SEQ ID NO: 272
  source 1..107: note = UGX102 light chain variable region sequence

SEQ ID NO: 1046 - protein, 447 aa, synthetic construct; identical to SEQ ID NO: 1
  source 1..447: note = UGX104 heavy chain sequence

SEQ ID NO: 1047 - protein, 213 aa, synthetic construct
  source 1..213: note = UGX104 light chain sequence
AIQLTQSPSSLSASVGDRVTITCRASQGIESALVWYQQKPGKAPKLLIYDASSLESGVPSRFSGSGSGTDFTLTISSLQPEDFATYYCQQFNDYFTFGPGTKVDIKRTVAAPSVFIFPPSDEQLKSGTASVVCLLNNFYPREAKVQWKVDNALQSGNSQESVTEQDSKDSTYSLSSTLTLSKADYEKHKVYACEVTHQGLSSPVTKSFNRGEC

SEQ ID NO: 1048 - protein, 117 aa, synthetic construct; identical to SEQ ID NO: 3
  source 1..117: note = UGX104 heavy chain variable region sequence

SEQ ID NO: 1049 - protein, 107 aa, synthetic construct; identical to SEQ ID NO: 274
  source 1..107: note = UGX104 light chain variable region sequence

SEQ ID NO: 1050 - protein, 447 aa, synthetic construct; identical to SEQ ID NO: 1
  source 1..447: note = UGX106 heavy chain sequence

SEQ ID NO: 1051 - protein, 213 aa, synthetic construct
  source 1..213: note = UGX106 light chain sequence
AIQLTQSPSSLSASVGDRVTITCRASQGILSALVWYQQKPGKAPKLLIYDASSLESGVPSRFSGSGSGTDFTLTISSLQPEDFATYYCQQFNDYFTFGPGTKVDIKRTVAAPSVFIFPPSDEQLKSGTASVVCLLNNFYPREAKVQWKVDNALQSGNSQESVTEQDSKDSTYSLSSTLTLSKADYEKHKVYACEVTHQGLSSPVTKSFNRGEC

SEQ ID NO: 1052 - protein, 117 aa, synthetic construct; identical to SEQ ID NO: 3
  source 1..117: note = UGX106 heavy chain variable region sequence

SEQ ID NO: 1053 - protein, 107 aa, synthetic construct; identical to SEQ ID NO: 276
  source 1..107: note = UGX106 light chain variable region sequence

SEQ ID NO: 1054 - protein, 447 aa, synthetic construct; identical to SEQ ID NO: 1
  source 1..447: note = UGX107 heavy chain sequence

SEQ ID NO: 1055 - protein, 213 aa, synthetic construct
  source 1..213: note = UGX107 light chain sequence
AIQLTQSPSSLSASVGDRVTITCRASQGIQSALVWYQQKPGKAPKLLIYDASSLESGVPSRFSGSGSGTDFTLTISSLQPEDFATYYCQQFNDYFTFGPGTKVDIKRTVAAPSVFIFPPSDEQLKSGTASVVCLLNNFYPREAKVQWKVDNALQSGNSQESVTEQDSKDSTYSLSSTLTLSKADYEKHKVYACEVTHQGLSSPVTKSFNRGEC

SEQ ID NO: 1056 - protein, 117 aa, synthetic construct; identical to SEQ ID NO: 3
  source 1..117: note = UGX107 heavy chain variable region sequence

SEQ ID NO: 1057 - protein, 107 aa, synthetic construct; identical to SEQ ID NO: 277
  source 1..107: note = UGX107 light chain variable region sequence

SEQ ID NO: 1058 - protein, 447 aa, synthetic construct; identical to SEQ ID NO: 1
  source 1..447: note = UGX109 heavy chain sequence

SEQ ID NO: 1059 - protein, 213 aa, synthetic construct
  source 1..213: note = UGX109 light chain sequence
AIQLTQSPSSLSASVGDRVTITCRASQGISDALVWYQQKPGKAPKLLIYDASSLESGVPSRFSGSGSGTDFTLTISSLQPEDFATYYCQQFNDYFTFGPGTKVDIKRTVAAPSVFIFPPSDEQLKSGTASVVCLLNNFYPREAKVQWKVDNALQSGNSQESVTEQDSKDSTYSLSSTLTLSKADYEKHKVYACEVTHQGLSSPVTKSFNRGEC

SEQ ID NO: 1060 - protein, 117 aa, synthetic construct; identical to SEQ ID NO: 3
  source 1..117: note = UGX109 heavy chain variable region sequence

SEQ ID NO: 1061 - protein, 107 aa, synthetic construct; identical to SEQ ID NO: 279
  source 1..107: note = UGX109 light chain variable region sequence

SEQ ID NO: 1062 - protein, 447 aa, synthetic construct; identical to SEQ ID NO: 1
  source 1..447: note = UGX110 heavy chain sequence

SEQ ID NO: 1063 - protein, 213 aa, synthetic construct
  source 1..213: note = UGX110 light chain sequence
AIQLTQSPSSLSASVGDRVTITCRASQGISEALVWYQQKPGKAPKLLIYDASSLESGVPSRFSGSGSGTDFTLTISSLQPEDFATYYCQQFNDYFTFGPGTKVDIKRTVAAPSVFIFPPSDEQLKSGTASVVCLLNNFYPREAKVQWKVDNALQSGNSQESVTEQDSKDSTYSLSSTLTLSKADYEKHKVYACEVTHQGLSSPVTKSFNRGEC

SEQ ID NO: 1064 - protein, 117 aa, synthetic construct; identical to SEQ ID NO: 3
  source 1..117: note = UGX110 heavy chain variable region sequence

SEQ ID NO: 1065 - protein, 107 aa, synthetic construct; identical to SEQ ID NO: 280
  source 1..107: note = UGX110 light chain variable region sequence

SEQ ID NO: 1066 - protein, 447 aa, synthetic construct; identical to SEQ ID NO: 1
  source 1..447: note = UGX112 heavy chain sequence

SEQ ID NO: 1067 - protein, 213 aa, synthetic construct
  source 1..213: note = UGX112 light chain sequence
AIQLTQSPSSLSASVGDRVTITCRASQGISQALVWYQQKPGKAPKLLIYDASSLESGVPSRFSGSGSGTDFTLTISSLQPEDFATYYCQQFNDYFTFGPGTKVDIKRTVAAPSVFIFPPSDEQLKSGTASVVCLLNNFYPREAKVQWKVDNALQSGNSQESVTEQDSKDSTYSLSSTLTLSKADYEKHKVYACEVTHQGLSSPVTKSFNRGEC

SEQ ID NO: 1068 - protein, 117 aa, synthetic construct; identical to SEQ ID NO: 3
  source 1..117: note = UGX112 heavy chain variable region sequence

SEQ ID NO: 1069 - protein, 107 aa, synthetic construct; identical to SEQ ID NO: 282
  source 1..107: note = UGX112 light chain variable region sequence

SEQ ID NO: 1070 - protein, 447 aa, synthetic construct; identical to SEQ ID NO: 1
  source 1..447: note = UGX114 heavy chain sequence

SEQ ID NO: 1071 - protein, 213 aa, synthetic construct
  source 1..213: note = UGX114 light chain sequence
AIQLTQSPSSLSASVGDRVTITCRASQGISSFLVWYQQKPGKAPKLLIYDASSLESGVPSRFSGSGSGTDFTLTISSLQPEDFATYYCQQFNDYFTFGPGTKVDIKRTVAAPSVFIFPPSDEQLKSGTASVVCLLNNFYPREAKVQWKVDNALQSGNSQESVTEQDSKDSTYSLSSTLTLSKADYEKHKVYACEVTHQGLSSPVTKSFNRGEC

SEQ ID NO: 1072 - protein, 117 aa, synthetic construct; identical to SEQ ID NO: 3
  source 1..117: note = UGX114 heavy chain variable region sequence

SEQ ID NO: 1073 - protein, 107 aa, synthetic construct; identical to SEQ ID NO: 284
  source 1..107: note = UGX114 light chain variable region sequence

SEQ ID NO: 1074 - protein, 447 aa, synthetic construct; identical to SEQ ID NO: 1
  source 1..447: note = UGX115 heavy chain sequence

SEQ ID NO: 1075 - protein, 213 aa, synthetic construct
  source 1..213: note = UGX115 light chain sequence
AIQLTQSPSSLSASVGDRVTITCRASQGISSVLVWYQQKPGKAPKLLIYDASSLESGVPSRFSGSGSGTDFTLTISSLQPEDFATYYCQQFNDYFTFGPGTKVDIKRTVAAPSVFIFPPSDEQLKSGTASVVCLLNNFYPREAKVQWKVDNALQSGNSQESVTEQDSKDSTYSLSSTLTLSKADYEKHKVYACEVTHQGLSSPVTKSFNRGEC

SEQ ID NO: 1076 - protein, 117 aa, synthetic construct; identical to SEQ ID NO: 3
  source 1..117: note = UGX115 heavy chain variable region sequence

SEQ ID NO: 1077 - protein, 107 aa, synthetic construct; identical to SEQ ID NO: 285
  source 1..107: note = UGX115 light chain variable region sequence

SEQ ID NO: 1078 - protein, 447 aa, synthetic construct; identical to SEQ ID NO: 1
  source 1..447: note = UGX116 heavy chain sequence

SEQ ID NO: 1079 - protein, 213 aa, synthetic construct
  source 1..213: note = UGX116 light chain sequence
AIQLTQSPSSLSASVGDRVTITCRASQGISSALFWYQQKPGKAPKLLIYDASSLESGVPSRFSGSGSGTDFTLTISSLQPEDFATYYCQQFNDYFTFGPGTKVDIKRTVAAPSVFIFPPSDEQLKSGTASVVCLLNNFYPREAKVQWKVDNALQSGNSQESVTEQDSKDSTYSLSSTLTLSKADYEKHKVYACEVTHQGLSSPVTKSFNRGEC

SEQ ID NO: 1080 - protein, 117 aa, synthetic construct; identical to SEQ ID NO: 3
  source 1..117: note = UGX116 heavy chain variable region sequence

SEQ ID NO: 1081 - protein, 107 aa, synthetic construct; identical to SEQ ID NO: 286
  source 1..107: note = UGX116 light chain variable region sequence

SEQ ID NO: 1082 - protein, 447 aa, synthetic construct; identical to SEQ ID NO: 1
  source 1..447: note = UGX117 heavy chain sequence

SEQ ID NO: 1083 - protein, 213 aa, synthetic construct
  source 1..213: note = UGX117 light chain sequence
AIQLTQSPSSLSASVGDRVTITCRASQGISSALIWYQQKPGKAPKLLIYDASSLESGVPSRFSGSGSGTDFTLTISSLQPEDFATYYCQQFNDYFTFGPGTKVDIKRTVAAPSVFIFPPSDEQLKSGTASVVCLLNNFYPREAKVQWKVDNALQSGNSQESVTEQDSKDSTYSLSSTLTLSKADYEKHKVYACEVTHQGLSSPVTKSFNRGEC

SEQ ID NO: 1084 - protein, 117 aa, synthetic construct; identical to SEQ ID NO: 3
  source 1..117: note = UGX117 heavy chain variable region sequence

SEQ ID NO: 1085 - protein, 107 aa, synthetic construct; identical to SEQ ID NO: 287
  source 1..107: note = UGX117 light chain variable region sequence

SEQ ID NO: 1086 - protein, 447 aa, synthetic construct; identical to SEQ ID NO: 1
  source 1..447: note = UGX118 heavy chain sequence

SEQ ID NO: 1087 - protein, 213 aa, synthetic construct
  source 1..213: note = UGX118 light chain sequence
AIQLTQSPSSLSASVGDRVTITCRASQGISSALVWYQQKPGKAPKLLIYFASSLESGVPSRFSGSGSGTDFTLTISSLQPEDFATYYCQQFNDYFTFGPGTKVDIKRTVAAPSVFIFPPSDEQLKSGTASVVCLLNNFYPREAKVQWKVDNALQSGNSQESVTEQDSKDSTYSLSSTLTLSKADYEKHKVYACEVTHQGLSSPVTKSFNRGEC

SEQ ID NO: 1088 - protein, 117 aa, synthetic construct; identical to SEQ ID NO: 3
  source 1..117: note = UGX118 heavy chain variable region sequence

SEQ ID NO: 1089 - protein, 107 aa, synthetic construct; identical to SEQ ID NO: 288
  source 1..107: note = UGX118 light chain variable region sequence

SEQ ID NO: 1090 - protein, 447 aa, synthetic construct; identical to SEQ ID NO: 1
  source 1..447: note = UGX119 heavy chain sequence

SEQ ID NO: 1091 - protein, 213 aa, synthetic construct
  source 1..213: note = UGX119 light chain sequence
AIQLTQSPSSLSASVGDRVTITCRASQGISSALVWYQQKPGKAPKLLIYLASSLESGVPSRFSGSGSGTDFTLTISSLQPEDFATYYCQQFNDYFTFGPGTKVDIKRTVAAPSVFIFPPSDEQLKSGTASVVCLLNNFYPREAKVQWKVDNALQSGNSQESVTEQDSKDSTYSLSSTLTLSKADYEKHKVYACEVTHQGLSSPVTKSFNRGEC

SEQ ID NO: 1092 - protein, 117 aa, synthetic construct; identical to SEQ ID NO: 3
  source 1..117: note = UGX119 heavy chain variable region sequence

SEQ ID NO: 1093 - protein, 107 aa, synthetic construct; identical to SEQ ID NO: 290
  source 1..107: note = UGX119 light chain variable region sequence

SEQ ID NO: 1094 - protein, 447 aa, synthetic construct; identical to SEQ ID NO: 1
  source 1..447: note = UGX122 heavy chain sequence

SEQ ID NO: 1095 - protein, 213 aa, synthetic construct
  source 1..213: note = UGX122 light chain sequence
AIQLTQSPSSLSASVGDRVTITCRASQGISSALVWYQQKPGKAPKLLIYSASSLESGVPSRFSGSGSGTDFTLTISSLQPEDFATYYCQQFNDYFTFGPGTKVDIKRTVAAPSVFIFPPSDEQLKSGTASVVCLLNNFYPREAKVQWKVDNALQSGNSQESVTEQDSKDSTYSLSSTLTLSKADYEKHKVYACEVTHQGLSSPVTKSFNRGEC

SEQ ID NO: 1096 - protein, 117 aa, synthetic construct; identical to SEQ ID NO: 3
  source 1..117: note = UGX122 heavy chain variable region sequence

SEQ ID NO: 1097 - protein, 107 aa, synthetic construct; identical to SEQ ID NO: 295
  source 1..107: note = UGX122 light chain variable region sequence

SEQ ID NO: 1098 - protein, 447 aa, synthetic construct; identical to SEQ ID NO: 1
  source 1..447: note = UGX123 heavy chain sequence

SEQ ID NO: 1099 - protein, 213 aa, synthetic construct
  source 1..213: note = UGX123 light chain sequence
AIQLTQSPSSLSASVGDRVTITCRASQGISSALVWYQQKPGKAPKLLIYTASSLESGVPSRFSGSGSGTDFTLTISSLQPEDFATYYCQQFNDYFTFGPGTKVDIKRTVAAPSVFIFPPSDEQLKSGTASVVCLLNNFYPREAKVQWKVDNALQSGNSQESVTEQDSKDSTYSLSSTLTLSKADYEKHKVYACEVTHQGLSSPVTKSFNRGEC

SEQ ID NO: 1100 - protein, 117 aa, synthetic construct; identical to SEQ ID NO: 3
  source 1..117: note = UGX123 heavy chain variable region sequence

SEQ ID NO: 1101 - protein, 107 aa, synthetic construct; identical to SEQ ID NO: 297
  source 1..107: note = UGX123 light chain variable region sequence

SEQ ID NO: 1102 - protein, 447 aa, synthetic construct; identical to SEQ ID NO: 1
  source 1..447: note = UGX124 heavy chain sequence

SEQ ID NO: 1103 - protein, 213 aa, synthetic construct
  source 1..213: note = UGX124 light chain sequence
AIQLTQSPSSLSASVGDRVTITCRASQGISSALVWYQQKPGKAPKLLIYVASSLESGVPSRFSGSGSGTDFTLTISSLQPEDFATYYCQQFNDYFTFGPGTKVDIKRTVAAPSVFIFPPSDEQLKSGTASVVCLLNNFYPREAKVQWKVDNALQSGNSQESVTEQDSKDSTYSLSSTLTLSKADYEKHKVYACEVTHQGLSSPVTKSFNRGEC

SEQ ID NO: 1104 - protein, 117 aa, synthetic construct; identical to SEQ ID NO: 3
  source 1..117: note = UGX124 heavy chain variable region sequence

SEQ ID NO: 1105 - protein, 107 aa, synthetic construct; identical to SEQ ID NO: 300
  source 1..107: note = UGX124 light chain variable region sequence

SEQ ID NO: 1106 - protein, 447 aa, synthetic construct; identical to SEQ ID NO: 1
  source 1..447: note = UGX125 heavy chain sequence

SEQ ID NO: 1107 - protein, 213 aa, synthetic construct
  source 1..213: note = UGX125 light chain sequence
AIQLTQSPSSLSASVGDRVTITCRASQGISSALVWYQQKPGKAPKLLIYDVSSLESGVPSRFSGSGSGTDFTLTISSLQPEDFATYYCQQFNDYFTFGPGTKVDIKRTVAAPSVFIFPPSDEQLKSGTASVVCLLNNFYPREAKVQWKVDNALQSGNSQESVTEQDSKDSTYSLSSTLTLSKADYEKHKVYACEVTHQGLSSPVTKSFNRGEC

SEQ ID NO: 1108 - protein, 117 aa, synthetic construct; identical to SEQ ID NO: 3
  source 1..117: note = UGX125 heavy chain variable region sequence

SEQ ID NO: 1109 - protein, 107 aa, synthetic construct; identical to SEQ ID NO: 301
  source 1..107: note = UGX125 light chain variable region sequence

SEQ ID NO: 1110 - protein, 447 aa, synthetic construct; identical to SEQ ID NO: 1
  source 1..447: note = UGX126 heavy chain sequence

SEQ ID NO: 1111 - protein, 213 aa, synthetic construct
  source 1..213: note = UGX126 light chain sequence
AIQLTQSPSSLSASVGDRVTITCRASQGISSALVWYQQKPGKAPKLLIYDADSLESGVPSRFSGSGSGTDFTLTISSLQPEDFATYYCQQFNDYFTFGPGTKVDIKRTVAAPSVFIFPPSDEQLKSGTASVVCLLNNFYPREAKVQWKVDNALQSGNSQESVTEQDSKDSTYSLSSTLTLSKADYEKHKVYACEVTHQGLSSPVTKSFNRGEC

SEQ ID NO: 1112 - protein, 117 aa, synthetic construct; identical to SEQ ID NO: 3
  source 1..117: note = UGX126 heavy chain variable region sequence

SEQ ID NO: 1113 - protein, 107 aa, synthetic construct; identical to SEQ ID NO: 303
  source 1..107: note = UGX126 light chain variable region sequence

SEQ ID NO: 1114 - protein, 447 aa, synthetic construct; identical to SEQ ID NO: 1
  source 1..447: note = UGX128 heavy chain sequence

SEQ ID NO: 1115 - protein, 213 aa, synthetic construct
  source 1..213: note = UGX128 light chain sequence
AIQLTQSPSSLSASVGDRVTITCRASQGISSALVWYQQKPGKAPKLLIYDAFSLESGVPSRFSGSGSGTDFTLTISSLQPEDFATYYCQQFNDYFTFGPGTKVDIKRTVAAPSVFIFPPSDEQLKSGTASVVCLLNNFYPREAKVQWKVDNALQSGNSQESVTEQDSKDSTYSLSSTLTLSKADYEKHKVYACEVTHQGLSSPVTKSFNRGEC

SEQ ID NO: 1116 - protein, 117 aa, synthetic construct; identical to SEQ ID NO: 3
  source 1..117: note = UGX128 heavy chain variable region sequence

SEQ ID NO: 1117 - protein, 107 aa, synthetic construct; identical to SEQ ID NO: 308
  source 1..107: note = UGX128 light chain variable region sequence

SEQ ID NO: 1118 - protein, 447 aa, synthetic construct; identical to SEQ ID NO: 1
  source 1..447: note = UGX129 heavy chain sequence

SEQ ID NO: 1119 - protein, 213 aa, synthetic construct
  source 1..213: note = UGX129 light chain sequence
AIQLTQSPSSLSASVGDRVTITCRASQGISSALVWYQQKPGKAPKLLIYDASDLESGVPSRFSGSGSGTDFTLTISSLQPEDFATYYCQQFNDYFTFGPGTKVDIKRTVAAPSVFIFPPSDEQLKSGTASVVCLLNNFYPREAKVQWKVDNALQSGNSQESVTEQDSKDSTYSLSSTLTLSKADYEKHKVYACEVTHQGLSSPVTKSFNRGEC

SEQ ID NO: 1120 - protein, 117 aa, synthetic construct; identical to SEQ ID NO: 3
  source 1..117: note = UGX129 heavy chain variable region sequence

SEQ ID NO: 1121 - protein, 107 aa, synthetic construct; identical to SEQ ID NO: 309
  source 1..107: note = UGX129 light chain variable region sequence

SEQ ID NO: 1122 - protein, 447 aa, synthetic construct; identical to SEQ ID NO: 1
  source 1..447: note = UGX130 heavy chain sequence

SEQ ID NO: 1123 - protein, 213 aa, synthetic construct
  source 1..213: note = UGX130 light chain sequence
AIQLTQSPSSLSASVGDRVTITCRASQGISSALVWYQQKPGKAPKLLIYDASELESGVPSRFSGSGSGTDFTLTISSLQPEDFATYYCQQFNDYFTFGPGTKVDIKRTVAAPSVFIFPPSDEQLKSGTASVVCLLNNFYPREAKVQWKVDNALQSGNSQESVTEQDSKDSTYSLSSTLTLSKADYEKHKVYACEVTHQGLSSPVTKSFNRGEC

SEQ ID NO: 1124 - protein, 117 aa, synthetic construct; identical to SEQ ID NO: 3
  source 1..117: note = UGX130 heavy chain variable region sequence

SEQ ID NO: 1125 - protein, 107 aa, synthetic construct; identical to SEQ ID NO: 311
  source 1..107: note = UGX130 light chain variable region sequence

SEQ ID NO: 1126 - protein, 447 aa, synthetic construct; identical to SEQ ID NO: 1
  source 1..447: note = UGX131 heavy chain sequence

SEQ ID NO: 1127 - protein, 213 aa, synthetic construct
  source 1..213: note = UGX131 light chain sequence
AIQLTQSPSSLSASVGDRVTITCRASQGISSALVWYQQKPGKAPKLLIYDASFLESGVPSRFSGSGSGTDFTLTISSLQPEDFATYYCQQFNDYFTFGPGTKVDIKRTVAAPSVFIFPPSDEQLKSGTASVVCLLNNFYPREAKVQWKVDNALQSGNSQESVTEQDSKDSTYSLSSTLTLSKADYEKHKVYACEVTHQGLSSPVTKSFNRGEC

SEQ ID NO: 1128 - protein, 117 aa, synthetic construct; identical to SEQ ID NO: 3
  source 1..117: note = UGX131 heavy chain variable region sequence

SEQ ID NO: 1129 - protein, 107 aa, synthetic construct; identical to SEQ ID NO: 313
  source 1..107: note = UGX131 light chain variable region sequence

SEQ ID NO: 1130 - protein, 447 aa, synthetic construct; identical to SEQ ID NO: 1
  source 1..447: note = UGX134 heavy chain sequence

SEQ ID NO: 1131 - protein, 213 aa, synthetic construct
  source 1..213: note = UGX134 light chain sequence
AIQLTQSPSSLSASVGDRVTITCRASQGISSALVWYQQKPGKAPKLLIYDASSLESGVPSRFSGSGSGTDFTLTISSLQPEDFATYYCQQYNDYFTFGPGTKVDIKRTVAAPSVFIFPPSDEQLKSGTASVVCLLNNFYPREAKVQWKVDNALQSGNSQESVTEQDSKDSTYSLSSTLTLSKADYEKHKVYACEVTHQGLSSPVTKSFNRGEC

SEQ ID NO: 1132 - protein, 117 aa, synthetic construct; identical to SEQ ID NO: 3
  source 1..117: note = UGX134 heavy chain variable region sequence

SEQ ID NO: 1133 - protein, 107 aa, synthetic construct; identical to SEQ ID NO: 319
  source 1..107: note = UGX134 light chain variable region sequence

SEQ ID NO: 1134 - protein, 447 aa, synthetic construct; identical to SEQ ID NO: 1
  source 1..447: note = UGX135 heavy chain sequence

SEQ ID NO: 1135 - protein, 213 aa, synthetic construct
  source 1..213: note = UGX135 light chain sequence
AIQLTQSPSSLSASVGDRVTITCRASQGISSALVWYQQKPGKAPKLLIYDASSLESGVPSRFSGSGSGTDFTLTISSLQPEDFATYYCQQFDDYFTFGPGTKVDIKRTVAAPSVFIFPPSDEQLKSGTASVVCLLNNFYPREAKVQWKVDNALQSGNSQESVTEQDSKDSTYSLSSTLTLSKADYEKHKVYACEVTHQGLSSPVTKSFNRGEC

SEQ ID NO: 1136 - protein, 117 aa, synthetic construct; identical to SEQ ID NO: 3
  source 1..117: note = UGX135 heavy chain variable region sequence

SEQ ID NO: 1137 - protein, 107 aa, synthetic construct; identical to SEQ ID NO: 322
  source 1..107: note = UGX135 light chain variable region sequence

SEQ ID NO: 1138 - protein, 447 aa, synthetic construct; identical to SEQ ID NO: 1
  source 1..447: note = UGX138 heavy chain sequence

SEQ ID NO: 1139 - protein, 213 aa, synthetic construct
  source 1..213: note = UGX138 light chain sequence
AIQLTQSPSSLSASVGDRVTITCRASQGISSALVWYQQKPGKAPKLLIYDASSLESGVPSRFSGSGSGTDFTLTISSLQPEDFATYYCQQFSDYFTFGPGTKVDIKRTVAAPSVFIFPPSDEQLKSGTASVVCLLNNFYPREAKVQWKVDNALQSGNSQESVTEQDSKDSTYSLSSTLTLSKADYEKHKVYACEVTHQGLSSPVTKSFNRGEC

SEQ ID NO: 1140 - protein, 117 aa, synthetic construct; identical to SEQ ID NO: 3
  source 1..117: note = UGX138 heavy chain variable region sequence

SEQ ID NO: 1141 - protein, 107 aa, synthetic construct; identical to SEQ ID NO: 327
  source 1..107: note = UGX138 light chain variable region sequence

SEQ ID NO: 1142 - protein, 447 aa, synthetic construct; identical to SEQ ID NO: 1
  source 1..447: note = UGX141 heavy chain sequence

SEQ ID NO: 1143 - protein, 213 aa, synthetic construct
  source 1..213: note = UGX141 light chain sequence
AIQLTQSPSSLSASVGDRVTITCRASQGISSALVWYQQKPGKAPKLLIYDASSLESGVPSRFSGSGSGTDFTLTISSLQPEDFATYYCQQFNQYFTFGPGTKVDIKRTVAAPSVFIFPPSDEQLKSGTASVVCLLNNFYPREAKVQWKVDNALQSGNSQESVTEQDSKDSTYSLSSTLTLSKADYEKHKVYACEVTHQGLSSPVTKSFNRGEC

SEQ ID NO: 1144 - protein, 117 aa, synthetic construct; identical to SEQ ID NO: 3
  source 1..117: note = UGX141 heavy chain variable region sequence

SEQ ID NO: 1145 - protein, 107 aa, synthetic construct; identical to SEQ ID NO: 333
  source 1..107: note = UGX141 light chain variable region sequence

SEQ ID NO: 1146 - protein, 447 aa, synthetic construct; identical to SEQ ID NO: 1
  source 1..447: note = UGX142 heavy chain sequence

SEQ ID NO: 1147 - protein, 213 aa, synthetic construct
  source 1..213: note = UGX142 light chain sequence
AIQLTQSPSSLSASVGDRVTITCRASQGISSALVWYQQKPGKAPKLLIYDASSLESGVPSRFSGSGSGTDFTLTISSLQPEDFATYYCQQFNSYFTFGPGTKVDIKRTVAAPSVFIFPPSDEQLKSGTASVVCLLNNFYPREAKVQWKVDNALQSGNSQESVTEQDSKDSTYSLSSTLTLSKADYEKHKVYACEVTHQGLSSPVTKSFNRGEC

SEQ ID NO: 1148 - protein, 117 aa, synthetic construct; identical to SEQ ID NO: 3
  source 1..117: note = UGX142 heavy chain variable region sequence

SEQ ID NO: 1149 - protein, 107 aa, synthetic construct; identical to SEQ ID NO: 335
  source 1..107: note = UGX142 light chain variable region sequence

SEQ ID NO: 1150 - protein, 447 aa, synthetic construct; identical to SEQ ID NO: 1
  source 1..447: note = UGX143 heavy chain sequence

SEQ ID NO: 1151 - protein, 213 aa, synthetic construct
  source 1..213: note = UGX143 light chain sequence
AIQLTQSPSSLSASVGDRVTITCRASQGISSALVWYQQKPGKAPKLLIYDASSLESGVPSRFSGSGSGTDFTLTISSLQPEDFATYYCQQFNTYFTFGPGTKVDIKRTVAAPSVFIFPPSDEQLKSGTASVVCLLNNFYPREAKVQWKVDNALQSGNSQESVTEQDSKDSTYSLSSTLTLSKADYEKHKVYACEVTHQGLSSPVTKSFNRGEC

SEQ ID NO: 1152 - protein, 117 aa, synthetic construct; identical to SEQ ID NO: 3
  source 1..117: note = UGX143 heavy chain variable region sequence

SEQ ID NO: 1153 - protein, 107 aa, synthetic construct; identical to SEQ ID NO: 337
  source 1..107: note = UGX143 light chain variable region sequence

SEQ ID NO: 1154 - protein, 447 aa, synthetic construct; identical to SEQ ID NO: 1
  source 1..447: note = UGX144 heavy chain sequence

SEQ ID NO: 1155 - protein, 213 aa, synthetic construct
  source 1..213: note = UGX144 light chain sequence
AIQLTQSPSSLSASVGDRVTITCRASQGISSALVWYQQKPGKAPKLLIYDASSLESGVPSRFSGSGSGTDFTLTISSLQPEDFATYYCQQFNDDFTFGPGTKVDIKRTVAAPSVFIFPPSDEQLKSGTASVVCLLNNFYPREAKVQWKVDNALQSGNSQESVTEQDSKDSTYSLSSTLTLSKADYEKHKVYACEVTHQGLSSPVTKSFNRGEC

SEQ ID NO: 1156 - protein, 117 aa, synthetic construct; identical to SEQ ID NO: 3
  source 1..117: note = UGX144 heavy chain variable region sequence

SEQ ID NO: 1157 - protein, 107 aa, synthetic construct; identical to SEQ ID NO: 340
  source 1..107: note = UGX144 light chain variable region sequence

SEQ ID NO: 1158 - protein, 447 aa, synthetic construct; identical to SEQ ID NO: 1
  source 1..447: note = UGX146 heavy chain sequence

SEQ ID NO: 1159 - protein, 213 aa, synthetic construct
  source 1..213: note = UGX146 light chain sequence
AIQLTQSPSSLSASVGDRVTITCRASQGISSALVWYQQKPGKAPKLLIYDASSLESGVPSRFSGSGSGTDFTLTISSLQPEDFATYYCQQFNDFFTFGPGTKVDIKRTVAAPSVFIFPPSDEQLKSGTASVVCLLNNFYPREAKVQWKVDNALQSGNSQESVTEQDSKDSTYSLSSTLTLSKADYEKHKVYACEVTHQGLSSPVTKSFNRGEC

SEQ ID NO: 1160 - protein, 117 aa, synthetic construct; identical to SEQ ID NO: 3
  source 1..117: note = UGX146 heavy chain variable region sequence

SEQ ID NO: 1161 - protein, 107 aa, synthetic construct; identical to SEQ ID NO: 343
  source 1..107: note = UGX146 light chain variable region sequence

SEQ ID NO: 1162 - protein, 447 aa, synthetic construct; identical to SEQ ID NO: 1
  source 1..447: note = UGX147 heavy chain sequence

SEQ ID NO: 1163 - protein, 213 aa, synthetic construct
  source 1..213: note = UGX147 light chain sequence
AIQLTQSPSSLSASVGDRVTITCRASQGISSALVWYQQKPGKAPKLLIYDASSLESGVPSRFSGSGSGTDFTLTISSLQPEDFATYYCQQFNDSFTFGPGTKVDIKRTVAAPSVFIFPPSDEQLKSGTASVVCLLNNFYPREAKVQWKVDNALQSGNSQESVTEQDSKDSTYSLSSTLTLSKADYEKHKVYACEVTHQGLSSPVTKSFNRGEC

SEQ ID NO: 1164 - protein, 117 aa, synthetic construct; identical to SEQ ID NO: 3
  source 1..117: note = UGX147 heavy chain variable region sequence

SEQ ID NO: 1165 - protein, 107 aa, synthetic construct; identical to SEQ ID NO: 346
  source 1..107: note = UGX147 light chain variable region sequence

SEQ ID NO: 1166 - protein, 447 aa, synthetic construct
  source 1..447: note = UGX148 heavy chain sequence
QVQLVQSGAEVKKPGASVKVSCKASGYTFFNHYMHWVRQAPGQGLEWMGIINPISGSTSNAQKFQGRVTMTRDTSTSTVYMELSSLRSEDTAVYYCARDIVDAFDFWGQGTMVTVSSASTKGPSVFPLAPSSKSTSGGTAALGCLVKDYFPEPVTVSWNSGALTSGVHTFPAVLQSSGLYSLSSVVTVPSSSLGTQTYICNVNHKPSNTKVDKKVEPKSCDKTHTCPPCPAPELLGGPSVFLFPPKPKDTLMISRTPEVTCVVVDVSHEDPEVKFNWYVDGVEVHNAKTKPREEQYNSTYRVVSVLTVLHQDWLNGKEYKCKVSNKALPAPIEKTISKAKGQPREPQVYTLPPSRDELTKNQVSLTCLVKGFYPSDIAVEWESNGQPENNYKTTPPVLDSDGSFFLYSKLTVDKSRWQQGNVFSCSVMHEALHNHYTQKSLSLSPGK

SEQ ID NO: 1167 - protein, 213 aa, synthetic construct; identical to SEQ ID NO: 2
  source 1..213: note = UGX148 light chain sequence

SEQ ID NO: 1168 - protein, 117 aa, synthetic construct; identical to SEQ ID NO: 204
  source 1..117: note = UGX148 heavy chain variable region sequence

SEQ ID NO: 1169 - protein, 107 aa, synthetic construct; identical to SEQ ID NO: 4
  source 1..107: note = UGX148 light chain variable region sequence

SEQ ID NO: 1170 - protein, 447 aa, synthetic construct
  source 1..447: note = UGX149 heavy chain sequence
QVQLVQSGAEVKKPGASVKVSCKASGYTFTDHYMHWVRQAPGQGLEWMGIINPISGSTSNAQKFQGRVTMTRDTSTSTVYMELSSLRSEDTAVYYCARDIVDAFDFWGQGTMVTVSSASTKGPSVFPLAPSSKSTSGGTAALGCLVKDYFPEPVTVSWNSGALTSGVHTFPAVLQSSGLYSLSSVVTVPSSSLGTQTYICNVNHKPSNTKVDKKVEPKSCDKTHTCPPCPAPELLGGPSVFLFPPKPKDTLMISRTPEVTCVVVDVSHEDPEVKFNWYVDGVEVHNAKTKPREEQYNSTYRVVSVLTVLHQDWLNGKEYKCKVSNKALPAPIEKTISKAKGQPREPQVYTLPPSRDELTKNQVSLTCLVKGFYPSDIAVEWESNGQPENNYKTTPPVLDSDGSFFLYSKLTVDKSRWQQGNVFSCSVMHEALHNHYTQKSLSLSPGK

SEQ ID NO: 1171 - protein, 213 aa, synthetic construct; identical to SEQ ID NO: 2
  source 1..213: note = UGX149 light chain sequence

SEQ ID NO: 1172 - protein, 117 aa, synthetic construct; identical to SEQ ID NO: 205
  source 1..117: note = UGX149 heavy chain variable region sequence

SEQ ID NO: 1173 - protein, 107 aa, synthetic construct; identical to SEQ ID NO: 4
  source 1..107: note = UGX149 light chain variable region sequence

SEQ ID NO: 1174 - protein, 447 aa, synthetic construct
  source 1..447: note = UGX150 heavy chain sequence
QVQLVQSGAEVKKPGASVKVSCKASGYTFTEHYMHWVRQAPGQGLEWMGIINPISGSTSNAQKFQGRVTMTRDTSTSTVYMELSSLRSEDTAVYYCARDIVDAFDFWGQGTMVTVSSASTKGPSVFPLAPSSKSTSGGTAALGCLVKDYFPEPVTVSWNSGALTSGVHTFPAVLQSSGLYSLSSVVTVPSSSLGTQTYICNVNHKPSNTKVDKKVEPKSCDKTHTCPPCPAPELLGGPSVFLFPPKPKDTLMISRTPEVTCVVVDVSHEDPEVKFNWYVDGVEVHNAKTKPREEQYNSTYRVVSVLTVLHQDWLNGKEYKCKVSNKALPAPIEKTISKAKGQPREPQVYTLPPSRDELTKNQVSLTCLVKGFYPSDIAVEWESNGQPENNYKTTPPVLDSDGSFFLYSKLTVDKSRWQQGNVFSCSVMHEALHNHYTQKSLSLSPGK

SEQ ID NO: 1175 - protein, 213 aa, synthetic construct; identical to SEQ ID NO: 2
  source 1..213: note = UGX150 light chain sequence

SEQ ID NO: 1176 - protein, 117 aa, synthetic construct; identical to SEQ ID NO: 206
  source 1..117: note = UGX150 heavy chain variable region sequence

SEQ ID NO: 1177 - protein, 107 aa, synthetic construct; identical to SEQ ID NO: 4
  source 1..107: note = UGX150 light chain variable region sequence

SEQ ID NO: 1178 - protein, 447 aa, synthetic construct
  source 1..447: note = UGX151 heavy chain sequence
QVQLVQSGAEVKKPGASVKVSCKASGYTFTFHYMHWVRQAPGQGLEWMGIINPISGSTSNAQKFQGRVTMTRDTSTSTVYMELSSLRSEDTAVYYCARDIVDAFDFWGQGTMVTVSSASTKGPSVFPLAPSSKSTSGGTAALGCLVKDYFPEPVTVSWNSGALTSGVHTFPAVLQSSGLYSLSSVVTVPSSSLGTQTYICNVNHKPSNTKVDKKVEPKSCDKTHTCPPCPAPELLGGPSVFLFPPKPKDTLMISRTPEVTCVVVDVSHEDPEVKFNWYVDGVEVHNAKTKPREEQYNSTYRVVSVLTVLHQDWLNGKEYKCKVSNKALPAPIEKTISKAKGQPREPQVYTLPPSRDELTKNQVSLTCLVKGFYPSDIAVEWESNGQPENNYKTTPPVLDSDGSFFLYSKLTVDKSRWQQGNVFSCSVMHEALHNHYTQKSLSLSPGK

SEQ ID NO: 1179 - protein, 213 aa, synthetic construct; identical to SEQ ID NO: 2
  source 1..213: note = UGX151 light chain sequence

SEQ ID NO: 1180 - protein, 117 aa, synthetic construct; identical to SEQ ID NO: 207
  source 1..117: note = UGX151 heavy chain variable region sequence

SEQ ID NO: 1181 - protein, 107 aa, synthetic construct; identical to SEQ ID NO: 4
  source 1..107: note = UGX151 light chain variable region sequence

SEQ ID NO: 1182 - protein, 447 aa, synthetic construct
  source 1..447: note = UGX152 heavy chain sequence
QVQLVQSGAEVKKPGASVKVSCKASGYTFTQHYMHWVRQAPGQGLEWMGIINPISGSTSNAQKFQGRVTMTRDTSTSTVYMELSSLRSEDTAVYYCARDIVDAFDFWGQGTMVTVSSASTKGPSVFPLAPSSKSTSGGTAALGCLVKDYFPEPVTVSWNSGALTSGVHTFPAVLQSSGLYSLSSVVTVPSSSLGTQTYICNVNHKPSNTKVDKKVEPKSCDKTHTCPPCPAPELLGGPSVFLFPPKPKDTLMISRTPEVTCVVVDVSHEDPEVKFNWYVDGVEVHNAKTKPREEQYNSTYRVVSVLTVLHQDWLNGKEYKCKVSNKALPAPIEKTISKAKGQPREPQVYTLPPSRDELTKNQVSLTCLVKGFYPSDIAVEWESNGQPENNYKTTPPVLDSDGSFFLYSKLTVDKSRWQQGNVFSCSVMHEALHNHYTQKSLSLSPGK

SEQ ID NO: 1183 - protein, 213 aa, synthetic construct; identical to SEQ ID NO: 2
  source 1..213: note = UGX152 light chain sequence

SEQ ID NO: 1184 - protein, 117 aa, synthetic construct; identical to SEQ ID NO: 208
  source 1..117: note = UGX152 heavy chain variable region sequence

SEQ ID NO: 1185 - protein, 107 aa, synthetic construct; identical to SEQ ID NO: 4
  source 1..107: note = UGX152 light chain variable region sequence

SEQ ID NO: 1186 - protein, 447 aa, synthetic construct
  source 1..447: note = UGX153 heavy chain sequence
QVQLVQSGAEVKKPGASVKVSCKASGYTFTRHYMHWVRQAPGQGLEWMGIINPISGSTSNAQKFQGRVTMTRDTSTSTVYMELSSLRSEDTAVYYCARDIVDAFDFWGQGTMVTVSSASTKGPSVFPLAPSSKSTSGGTAALGCLVKDYFPEPVTVSWNSGALTSGVHTFPAVLQSSGLYSLSSVVTVPSSSLGTQTYICNVNHKPSNTKVDKKVEPKSCDKTHTCPPCPAPELLGGPSVFLFPPKPKDTLMISRTPEVTCVVVDVSHEDPEVKFNWYVDGVEVHNAKTKPREEQYNSTYRVVSVLTVLHQDWLNGKEYKCKVSNKALPAPIEKTISKAKGQPREPQVYTLPPSRDELTKNQVSLTCLVKGFYPSDIAVEWESNGQPENNYKTTPPVLDSDGSFFLYSKLTVDKSRWQQGNVFSCSVMHEALHNHYTQKSLSLSPGK

SEQ ID NO: 1187 - protein, 213 aa, synthetic construct; identical to SEQ ID NO: 2
  source 1..213: note = UGX153 light chain sequence

SEQ ID NO: 1188 - protein, 117 aa, synthetic construct; identical to SEQ ID NO: 209
  source 1..117: note = UGX153 heavy chain variable region sequence

SEQ ID NO: 1189 - protein, 107 aa, synthetic construct; identical to SEQ ID NO: 4
  source 1..107: note = UGX153 light chain variable region sequence

SEQ ID NO: 1190 - protein, 447 aa, synthetic construct
  source 1..447: note = UGX154 heavy chain sequence
QVQLVQSGAEVKKPGASVKVSCKASGYTFTNHYMHWVRQAPGQGLEWMGIIFPISGSTSNAQKFQGRVTMTRDTSTSTVYMELSSLRSEDTAVYYCARDIVDAFDFWGQGTMVTVSSASTKGPSVFPLAPSSKSTSGGTAALGCLVKDYFPEPVTVSWNSGALTSGVHTFPAVLQSSGLYSLSSVVTVPSSSLGTQTYICNVNHKPSNTKVDKKVEPKSCDKTHTCPPCPAPELLGGPSVFLFPPKPKDTLMISRTPEVTCVVVDVSHEDPEVKFNWYVDGVEVHNAKTKPREEQYNSTYRVVSVLTVLHQDWLNGKEYKCKVSNKALPAPIEKTISKAKGQPREPQVYTLPPSRDELTKNQVSLTCLVKGFYPSDIAVEWESNGQPENNYKTTPPVLDSDGSFFLYSKLTVDKSRWQQGNVFSCSVMHEALHNHYTQKSLSLSPGK

SEQ ID NO: 1191 - protein, 213 aa, synthetic construct; identical to SEQ ID NO: 2
  source 1..213: note = UGX154 light chain sequence

SEQ ID NO: 1192 - protein, 117 aa, synthetic construct; identical to SEQ ID NO: 210
  source 1..117: note = UGX154 heavy chain variable region sequence

SEQ ID NO: 1193 - protein, 107 aa, synthetic construct; identical to SEQ ID NO: 4
  source 1..107: note = UGX154 light chain variable region sequence

SEQ ID NO: 1194 - protein, 447 aa, synthetic construct
  source 1..447: note = UGX155 heavy chain sequence
QVQLVQSGAEVKKPGASVKVSCKASGYTFTNHYMHWVRQAPGQGLEWMGIIYPISGSTSNAQKFQGRVTMTRDTSTSTVYMELSSLRSEDTAVYYCARDIVDAFDFWGQGTMVTVSSASTKGPSVFPLAPSSKSTSGGTAALGCLVKDYFPEPVTVSWNSGALTSGVHTFPAVLQSSGLYSLSSVVTVPSSSLGTQTYICNVNHKPSNTKVDKKVEPKSCDKTHTCPPCPAPELLGGPSVFLFPPKPKDTLMISRTPEVTCVVVDVSHEDPEVKFNWYVDGVEVHNAKTKPREEQYNSTYRVVSVLTVLHQDWLNGKEYKCKVSNKALPAPIEKTISKAKGQPREPQVYTLPPSRDELTKNQVSLTCLVKGFYPSDIAVEWESNGQPENNYKTTPPVLDSDGSFFLYSKLTVDKSRWQQGNVFSCSVMHEALHNHYTQKSLSLSPGK

SEQ ID NO: 1195 - protein, 213 aa, synthetic construct; identical to SEQ ID NO: 2
  source 1..213: note = UGX155 light chain sequence

SEQ ID NO: 1196 - protein, 117 aa, synthetic construct; identical to SEQ ID NO: 211
  source 1..117: note = UGX155 heavy chain variable region sequence

SEQ ID NO: 1197 - protein, 107 aa, synthetic construct; identical to SEQ ID NO: 4
  source 1..107: note = UGX155 light chain variable region sequence

SEQ ID NO: 1198 - protein, 447 aa, synthetic construct
  source 1..447: note = UGX156 heavy chain sequence
QVQLVQSGAEVKKPGASVKVSCKASGYTFTNHYMHWVRQAPGQGLEWMGIINPFSGSTSNAQKFQGRVTMTRDTSTSTVYMELSSLRSEDTAVYYCARDIVDAFDFWGQGTMVTVSSASTKGPSVFPLAPSSKSTSGGTAALGCLVKDYFPEPVTVSWNSGALTSGVHTFPAVLQSSGLYSLSSVVTVPSSSLGTQTYICNVNHKPSNTKVDKKVEPKSCDKTHTCPPCPAPELLGGPSVFLFPPKPKDTLMISRTPEVTCVVVDVSHEDPEVKFNWYVDGVEVHNAKTKPREEQYNSTYRVVSVLTVLHQDWLNGKEYKCKVSNKALPAPIEKTISKAKGQPREPQVYTLPPSRDELTKNQVSLTCLVKGFYPSDIAVEWESNGQPENNYKTTPPVLDSDGSFFLYSKLTVDKSRWQQGNVFSCSVMHEALHNHYTQKSLSLSPGK

SEQ ID NO: 1199 - protein, 213 aa, synthetic construct; identical to SEQ ID NO: 2
  source 1..213: note = UGX156 light chain sequence

SEQ ID NO: 1200 - protein, 117 aa, synthetic construct; identical to SEQ ID NO: 212
  source 1..117: note = UGX156 heavy chain variable region sequence

SEQ ID NO: 1201 - protein, 107 aa, synthetic construct; identical to SEQ ID NO: 4
  source 1..107: note = UGX156 light chain variable region sequence

SEQ ID NO: 1202 - protein, 447 aa, synthetic construct
  source 1..447: note = UGX157 heavy chain sequence
QVQLVQSGAEVKKPGASVKVSCKASGYTFTNHYMHWVRQAPGQGLEWMGIINPYSGSTSNAQKFQGRVTMTRDTSTSTVYMELSSLRSEDTAVYYCARDIVDAFDFWGQGTMVTVSSASTKGPSVFPLAPSSKSTSGGTAALGCLVKDYFPEPVTVSWNSGALTSGVHTFPAVLQSSGLYSLSSVVTVPSSSLGTQTYICNVNHKPSNTKVDKKVEPKSCDKTHTCPPCPAPELLGGPSVFLFPPKPKDTLMISRTPEVTCVVVDVSHEDPEVKFNWYVDGVEVHNAKTKPREEQYNSTYRVVSVLTVLHQDWLNGKEYKCKVSNKALPAPIEKTISKAKGQPREPQVYTLPPSRDELTKNQVSLTCLVKGFYPSDIAVEWESNGQPENNYKTTPPVLDSDGSFFLYSKLTVDKSRWQQGNVFSCSVMHEALHNHYTQKSLSLSPGK

SEQ ID NO: 1203 - protein, 213 aa, synthetic construct; identical to SEQ ID NO: 2
  source 1..213: note = UGX157 light chain sequence

SEQ ID NO: 1204 - protein, 117 aa, synthetic construct; identical to SEQ ID NO: 213
  source 1..117: note = UGX157 heavy chain variable region sequence

SEQ ID NO: 1205 - protein, 107 aa, synthetic construct; identical to SEQ ID NO: 4
  source 1..107: note = UGX157 light chain variable region sequence

SEQ ID NO: 1206 - protein, 447 aa, synthetic construct
  source 1..447: note = UGX158 heavy chain sequence
QVQLVQSGAEVKKPGASVKVSCKASGYTFTNHYMHWVRQAPGQGLEWMGIINPISGSTDNAQKFQGRVTMTRDTSTSTVYMELSSLRSEDTAVYYCARDIVDAFDFWGQGTMVTVSSASTKGPSVFPLAPSSKSTSGGTAALGCLVKDYFPEPVTVSWNSGALTSGVHTFPAVLQSSGLYSLSSVVTVPSSSLGTQTYICNVNHKPSNTKVDKKVEPKSCDKTHTCPPCPAPELLGGPSVFLFPPKPKDTLMISRTPEVTCVVVDVSHEDPEVKFNWYVDGVEVHNAKTKPREEQYNSTYRVVSVLTVLHQDWLNGKEYKCKVSNKALPAPIEKTISKAKGQPREPQVYTLPPSRDELTKNQVSLTCLVKGFYPSDIAVEWESNGQPENNYKTTPPVLDSDGSFFLYSKLTVDKSRWQQGNVFSCSVMHEALHNHYTQKSLSLSPGK

SEQ ID NO: 1207 - protein, 213 aa, synthetic construct; identical to SEQ ID NO: 2
  source 1..213: note = UGX158 light chain sequence

SEQ ID NO: 1208 - protein, 117 aa, synthetic construct; identical to SEQ ID NO: 214
  source 1..117: note = UGX158 heavy chain variable region sequence

SEQ ID NO: 1209 - protein, 107 aa, synthetic construct; identical to SEQ ID NO: 4
  source 1..107: note = UGX158 light chain variable region sequence

SEQ ID NO: 1210 - protein, 447 aa, synthetic construct
  source 1..447: note = UGX159 heavy chain sequence
QVQLVQSGAEVKKPGASVKVSCKASGYTFTNHYMHWVRQAPGQGLEWMGIINPISGSTENAQKFQGRVTMTRDTSTSTVYMELSSLRSEDTAVYYCARDIVDAFDFWGQGTMVTVSSASTKGPSVFPLAPSSKSTSGGTAALGCLVKDYFPEPVTVSWNSGALTSGVHTFPAVLQSSGLYSLSSVVTVPSSSLGTQTYICNVNHKPSNTKVDKKVEPKSCDKTHTCPPCPAPELLGGPSVFLFPPKPKDTLMISRTPEVTCVVVDVSHEDPEVKFNWYVDGVEVHNAKTKPREEQYNSTYRVVSVLTVLHQDWLNGKEYKCKVSNKALPAPIEKTISKAKGQPREPQVYTLPPSRDELTKNQVSLTCLVKGFYPSDIAVEWESNGQPENNYKTTPPVLDSDGSFFLYSKLTVDKSRWQQGNVFSCSVMHEALHNHYTQKSLSLSPGK

SEQ ID NO: 1211 - protein, 213 aa, synthetic construct; identical to SEQ ID NO: 2
  source 1..213: note = UGX159 light chain sequence

SEQ ID NO: 1212 - protein, 117 aa, synthetic construct; identical to SEQ ID NO: 215
  source 1..117: note = UGX159 heavy chain variable region sequence

SEQ ID NO: 1213 - protein, 107 aa, synthetic construct; identical to SEQ ID NO: 4
  source 1..107: note = UGX159 light chain variable region sequence

SEQ ID NO: 1214 - protein, 447 aa, synthetic construct
  source 1..447: note = UGX161 heavy chain sequence
QVQLVQSGAEVKKPGASVKVSCKASGYTFTNHYMHWVRQAPGQGLEWMGIINPISGSTINAQKFQGRVTMTRDTSTSTVYMELSSLRSEDTAVYYCARDIVDAFDFWGQGTMVTVSSASTKGPSVFPLAPSSKSTSGGTAALGCLVKDYFPEPVTVSWNSGALTSGVHTFPAVLQSSGLYSLSSVVTVPSSSLGTQTYICNVNHKPSNTKVDKKVEPKSCDKTHTCPPCPAPELLGGPSVFLFPPKPKDTLMISRTPEVTCVVVDVSHEDPEVKFNWYVDGVEVHNAKTKPREEQYNSTYRVVSVLTVLHQDWLNGKEYKCKVSNKALPAPIEKTISKAKGQPREPQVYTLPPSRDELTKNQVSLTCLVKGFYPSDIAVEWESNGQPENNYKTTPPVLDSDGSFFLYSKLTVDKSRWQQGNVFSCSVMHEALHNHYTQKSLSLSPGK

SEQ ID NO: 1215 - protein, 213 aa, synthetic construct; identical to SEQ ID NO: 2
  source 1..213: note = UGX161 light chain sequence

SEQ ID NO: 1216 - protein, 117 aa, synthetic construct; identical to SEQ ID NO: 218
  source 1..117: note = UGX161 heavy chain variable region sequence

SEQ ID NO: 1217 - protein, 107 aa, synthetic construct; identical to SEQ ID NO: 4
  source 1..107: note = UGX161 light chain variable region sequence

SEQ ID NO: 1218 - protein, 447 aa, synthetic construct
  source 1..447: note = UGX162 heavy chain sequence
QVQLVQSGAEVKKPGASVKVSCKASGYTFTNHYMHWVRQAPGQGLEWMGIINPISGSTLNAQKFQGRVTMTRDTSTSTVYMELSSLRSEDTAVYYCARDIVDAFDFWGQGTMVTVSSASTKGPSVFPLAPSSKSTSGGTAALGCLVKDYFPEPVTVSWNSGALTSGVHTFPAVLQSSGLYSLSSVVTVPSSSLGTQTYICNVNHKPSNTKVDKKVEPKSCDKTHTCPPCPAPELLGGPSVFLFPPKPKDTLMISRTPEVTCVVVDVSHEDPEVKFNWYVDGVEVHNAKTKPREEQYNSTYRVVSVLTVLHQDWLNGKEYKCKVSNKALPAPIEKTISKAKGQPREPQVYTLPPSRDELTKNQVSLTCLVKGFYPSDIAVEWESNGQPENNYKTTPPVLDSDGSFFLYSKLTVDKSRWQQGNVFSCSVMHEALHNHYTQKSLSLSPGK

SEQ ID NO: 1219 - protein, 213 aa, synthetic construct; identical to SEQ ID NO: 2
  source 1..213: note = UGX162 light chain sequence

SEQ ID NO: 1220 - protein, 117 aa, synthetic construct; identical to SEQ ID NO: 220
  source 1..117: note = UGX162 heavy chain variable region sequence

SEQ ID NO: 1221 - protein, 107 aa, synthetic construct; identical to SEQ ID NO: 4
  source 1..107: note = UGX162 light chain variable region sequence

SEQ ID NO: 1222 - protein, 447 aa, synthetic construct
  source 1..447: note = UGX163 heavy chain sequence
QVQLVQSGAEVKKPGASVKVSCKASGYTFTNHYMHWVRQAPGQGLEWMGIINPISGSTQNAQKFQGRVTMTRDTSTSTVYMELSSLRSEDTAVYYCARDIVDAFDFWGQGTMVTVSSASTKGPSVFPLAPSSKSTSGGTAALGCLVKDYFPEPVTVSWNSGALTSGVHTFPAVLQSSGLYSLSSVVTVPSSSLGTQTYICNVNHKPSNTKVDKKVEPKSCDKTHTCPPCPAPELLGGPSVFLFPPKPKDTLMISRTPEVTCVVVDVSHEDPEVKFNWYVDGVEVHNAKTKPREEQYNSTYRVVSVLTVLHQDWLNGKEYKCKVSNKALPAPIEKTISKAKGQPREPQVYTLPPSRDELTKNQVSLTCLVKGFYPSDIAVEWESNGQPENNYKTTPPVLDSDGSFFLYSKLTVDKSRWQQGNVFSCSVMHEALHNHYTQKSLSLSPGK

SEQ ID NO: 1223 - protein, 213 aa, synthetic construct; identical to SEQ ID NO: 2
  source 1..213: note = UGX163 light chain sequence

SEQ ID NO: 1224 - protein, 117 aa, synthetic construct; identical to SEQ ID NO: 222
  source 1..117: note = UGX163 heavy chain variable region sequence

SEQ ID NO: 1225 - protein, 107 aa, synthetic construct; identical to SEQ ID NO: 4
  source 1..107: note = UGX163 light chain variable region sequence

SEQ ID NO: 1226 - protein, 447 aa, synthetic construct
  source 1..447: note = UGX164 heavy chain sequence
QVQLVQSGAEVKKPGASVKVSCKASGYTFTNHYMHWVRQAPGQGLEWMGIINPISGSTTNAQKFQGRVTMTRDTSTSTVYMELSSLRSEDTAVYYCARDIVDAFDFWGQGTMVTVSSASTKGPSVFPLAPSSKSTSGGTAALGCLVKDYFPEPVTVSWNSGALTSGVHTFPAVLQSSGLYSLSSVVTVPSSSLGTQTYICNVNHKPSNTKVDKKVEPKSCDKTHTCPPCPAPELLGGPSVFLFPPKPKDTLMISRTPEVTCVVVDVSHEDPEVKFNWYVDGVEVHNAKTKPREEQYNSTYRVVSVLTVLHQDWLNGKEYKCKVSNKALPAPIEKTISKAKGQPREPQVYTLPPSRDELTKNQVSLTCLVKGFYPSDIAVEWESNGQPENNYKTTPPVLDSDGSFFLYSKLTVDKSRWQQGNVFSCSVMHEALHNHYTQKSLSLSPGK

SEQ ID NO: 1227 - protein, 213 aa, synthetic construct; identical to SEQ ID NO: 2
  source 1..213: note = UGX164 light chain sequence

SEQ ID NO: 1228 - protein, 117 aa, synthetic construct; identical to SEQ ID NO: 223
  source 1..117: note = UGX164 heavy chain variable region sequence

SEQ ID NO: 1229 - protein, 107 aa, synthetic construct; identical to SEQ ID NO: 4
  source 1..107: note = UGX164 light chain variable region sequence

SEQ ID NO: 1230 - protein, 447 aa, synthetic construct
  source 1..447: note = UGX165 heavy chain sequence
QVQLVQSGAEVKKPGASVKVSCKASGYTFTNHYMHWVRQAPGQGLEWMGIINPISGSTVNAQKFQGRVTMTRDTSTSTVYMELSSLRSEDTAVYYCARDIVDAFDFWGQGTMVTVSSASTKGPSVFPLAPSSKSTSGGTAALGCLVKDYFPEPVTVSWNSGALTSGVHTFPAVLQSSGLYSLSSVVTVPSSSLGTQTYICNVNHKPSNTKVDKKVEPKSCDKTHTCPPCPAPELLGGPSVFLFPPKPKDTLMISRTPEVTCVVVDVSHEDPEVKFNWYVDGVEVHNAKTKPREEQYNSTYRVVSVLTVLHQDWLNGKEYKCKVSNKALPAPIEKTISKAKGQPREPQVYTLPPSRDELTKNQVSLTCLVKGFYPSDIAVEWESNGQPENNYKTTPPVLDSDGSFFLYSKLTVDKSRWQQGNVFSCSVMHEALHNHYTQKSLSLSPGK

SEQ ID NO: 1231 - protein, 213 aa, synthetic construct; identical to SEQ ID NO: 2
  source 1..213: note = UGX165 light chain sequence

SEQ ID NO: 1232 - protein, 117 aa, synthetic construct; identical to SEQ ID NO: 225
  source 1..117: note = UGX165 heavy chain variable region sequence

SEQ ID NO: 1233 - protein, 107 aa, synthetic construct; identical to SEQ ID NO: 4
  source 1..107: note = UGX165 light chain variable region sequence

SEQ ID NO: 1234 - protein, 447 aa, synthetic construct
  source 1..447: note = UGX167 heavy chain sequence
QVQLVQSGAEVKKPGASVKVSCKASGYTFTNHYMHWVRQAPGQGLEWMGIINPISGSTSNAQKFQGRVTMTRDTSTSTVYMELSSLRSEDTAVYYCARDDVDAFDFWGQGTMVTVSSASTKGPSVFPLAPSSKSTSGGTAALGCLVKDYFPEPVTVSWNSGALTSGVHTFPAVLQSSGLYSLSSVVTVPSSSLGTQTYICNVNHKPSNTKVDKKVEPKSCDKTHTCPPCPAPELLGGPSVFLFPPKPKDTLMISRTPEVTCVVVDVSHEDPEVKFNWYVDGVEVHNAKTKPREEQYNSTYRVVSVLTVLHQDWLNGKEYKCKVSNKALPAPIEKTISKAKGQPREPQVYTLPPSRDELTKNQVSLTCLVKGFYPSDIAVEWESNGQPENNYKTTPPVLDSDGSFFLYSKLTVDKSRWQQGNVFSCSVMHEALHNHYTQKSLSLSPGK

SEQ ID NO: 1235 - protein, 213 aa, synthetic construct; identical to SEQ ID NO: 2
  source 1..213: note = UGX167 light chain sequence

SEQ ID NO: 1236 - protein, 117 aa, synthetic construct; identical to SEQ ID NO: 230
  source 1..117: note = UGX167 heavy chain variable region sequence

SEQ ID NO: 1237 - protein, 107 aa, synthetic construct; identical to SEQ ID NO: 4
  source 1..107: note = UGX167 light chain variable region sequence

SEQ ID NO: 1238 - protein, 447 aa, synthetic construct
  source 1..447: note = UGX171 heavy chain sequence
QVQLVQSGAEVKKPGASVKVSCKASGYTFTNHYMHWVRQAPGQGLEWMGIINPISGSTSNAQKFQGRVTMTRDTSTSTVYMELSSLRSEDTAVYYCARDIIDAFDFWGQGTMVTVSSASTKGPSVFPLAPSSKSTSGGTAALGCLVKDYFPEPVTVSWNSGALTSGVHTFPAVLQSSGLYSLSSVVTVPSSSLGTQTYICNVNHKPSNTKVDKKVEPKSCDKTHTCPPCPAPELLGGPSVFLFPPKPKDTLMISRTPEVTCVVVDVSHEDPEVKFNWYVDGVEVHNAKTKPREEQYNSTYRVVSVLTVLHQDWLNGKEYKCKVSNKALPAPIEKTISKAKGQPREPQVYTLPPSRDELTKNQVSLTCLVKGFYPSDIAVEWESNGQPENNYKTTPPVLDSDGSFFLYSKLTVDKSRWQQGNVFSCSVMHEALHNHYTQKSLSLSPGK

SEQ ID NO: 1239 - protein, 213 aa, synthetic construct; identical to SEQ ID NO: 2
  source 1..213: note = UGX171 light chain sequence

SEQ ID NO: 1240 - protein, 117 aa, synthetic construct; identical to SEQ ID NO: 238
  source 1..117: note = UGX171 heavy chain variable region sequence

SEQ ID NO: 1241 - protein, 107 aa, synthetic construct; identical to SEQ ID NO: 4
  source 1..107: note = UGX171 light chain variable region sequence

SEQ ID NO: 1242 - protein, 447 aa, synthetic construct
  source 1..447: note = UGX173 heavy chain sequence
QVQLVQSGAEVKKPGASVKVSCKASGYTFTNHYMHWVRQAPGQGLEWMGIINPISGSTSNAQKFQGRVTMTRDTSTSTVYMELSSLRSEDTAVYYCARDIVDDFDFWGQGTMVTVSSASTKGPSVFPLAPSSKSTSGGTAALGCLVKDYFPEPVTVSWNSGALTSGVHTFPAVLQSSGLYSLSSVVTVPSSSLGTQTYICNVNHKPSNTKVDKKVEPKSCDKTHTCPPCPAPELLGGPSVFLFPPKPKDTLMISRTPEVTCVVVDVSHEDPEVKFNWYVDGVEVHNAKTKPREEQYNSTYRVVSVLTVLHQDWLNGKEYKCKVSNKALPAPIEKTISKAKGQPREPQVYTLPPSRDELTKNQVSLTCLVKGFYPSDIAVEWESNGQPENNYKTTPPVLDSDGSFFLYSKLTVDKSRWQQGNVFSCSVMHEALHNHYTQKSLSLSPGK

SEQ ID NO: 1243 - protein, 213 aa, synthetic construct; identical to SEQ ID NO: 2
  source 1..213: note = UGX173 light chain sequence

SEQ ID NO: 1244 - protein, 117 aa, synthetic construct; identical to SEQ ID NO: 242
  source 1..117: note = UGX173 heavy chain variable region sequence

SEQ ID NO: 1245 - protein, 107 aa, synthetic construct; identical to SEQ ID NO: 4
  source 1..107: note = UGX173 light chain variable region sequence

SEQ ID NO: 1246 - protein, 447 aa, synthetic construct
  source 1..447: note = UGX174 heavy chain sequence
QVQLVQSGAEVKKPGASVKVSCKASGYTFTNHYMHWVRQAPGQGLEWMGIINPISGSTSNAQKFQGRVTMTRDTSTSTVYMELSSLRSEDTAVYYCARDIVDFFDFWGQGTMVTVSSASTKGPSVFPLAPSSKSTSGGTAALGCLVKDYFPEPVTVSWNSGALTSGVHTFPAVLQSSGLYSLSSVVTVPSSSLGTQTYICNVNHKPSNTKVDKKVEPKSCDKTHTCPPCPAPELLGGPSVFLFPPKPKDTLMISRTPEVTCVVVDVSHEDPEVKFNWYVDGVEVHNAKTKPREEQYNSTYRVVSVLTVLHQDWLNGKEYKCKVSNKALPAPIEKTISKAKGQPREPQVYTLPPSRDELTKNQVSLTCLVKGFYPSDIAVEWESNGQPENNYKTTPPVLDSDGSFFLYSKLTVDKSRWQQGNVFSCSVMHEALHNHYTQKSLSLSPGK

SEQ ID NO: 1247 - protein, 213 aa, synthetic construct; identical to SEQ ID NO: 2
  source 1..213: note = UGX174 light chain sequence

SEQ ID NO: 1248 - protein, 117 aa, synthetic construct; identical to SEQ ID NO: 243
  source 1..117: note = UGX174 heavy chain variable region sequence

SEQ ID NO: 1249 - protein, 107 aa, synthetic construct; identical to SEQ ID NO: 4
  source 1..107: note = UGX174 light chain variable region sequence

SEQ ID NO: 1250 - protein, 447 aa, synthetic construct
  source 1..447: note = UGX175 heavy chain sequence
QVQLVQSGAEVKKPGASVKVSCKASGYTFTNHYMHWVRQAPGQGLEWMGIINPISGSTSNAQKFQGRVTMTRDTSTSTVYMELSSLRSEDTAVYYCARDIVDSFDFWGQGTMVTVSSASTKGPSVFPLAPSSKSTSGGTAALGCLVKDYFPEPVTVSWNSGALTSGVHTFPAVLQSSGLYSLSSVVTVPSSSLGTQTYICNVNHKPSNTKVDKKVEPKSCDKTHTCPPCPAPELLGGPSVFLFPPKPKDTLMISRTPEVTCVVVDVSHEDPEVKFNWYVDGVEVHNAKTKPREEQYNSTYRVVSVLTVLHQDWLNGKEYKCKVSNKALPAPIEKTISKAKGQPREPQVYTLPPSRDELTKNQVSLTCLVKGFYPSDIAVEWESNGQPENNYKTTPPVLDSDGSFFLYSKLTVDKSRWQQGNVFSCSVMHEALHNHYTQKSLSLSPGK

SEQ ID NO: 1251 - protein, 213 aa, synthetic construct; identical to SEQ ID NO: 2
  source 1..213: note = UGX175 light chain sequence

SEQ ID NO: 1252 - protein, 117 aa, synthetic construct; identical to SEQ ID NO: 245
  source 1..117: note = UGX175 heavy chain variable region sequence

SEQ ID NO: 1253 - protein, 107 aa, synthetic construct; identical to SEQ ID NO: 4
  source 1..107: note = UGX175 light chain variable region sequence

SEQ ID NO: 1254 - protein, 447 aa, synthetic construct
  source 1..447: note = UGX176 heavy chain sequence
QVQLVQSGAEVKKPGASVKVSCKASGYTFTNHYMHWVRQAPGQGLEWMGIINPISGSTSNAQKFQGRVTMTRDTSTSTVYMELSSLRSEDTAVYYCARDIVDTFDFWGQGTMVTVSSASTKGPSVFPLAPSSKSTSGGTAALGCLVKDYFPEPVTVSWNSGALTSGVHTFPAVLQSSGLYSLSSVVTVPSSSLGTQTYICNVNHKPSNTKVDKKVEPKSCDKTHTCPPCPAPELLGGPSVFLFPPKPKDTLMISRTPEVTCVVVDVSHEDPEVKFNWYVDGVEVHNAKTKPREEQYNSTYRVVSVLTVLHQDWLNGKEYKCKVSNKALPAPIEKTISKAKGQPREPQVYTLPPSRDELTKNQVSLTCLVKGFYPSDIAVEWESNGQPENNYKTTPPVLDSDGSFFLYSKLTVDKSRWQQGNVFSCSVMHEALHNHYTQKSLSLSPGK

SEQ ID NO: 1255 - protein, 213 aa, synthetic construct; identical to SEQ ID NO: 2
  source 1..213: note = UGX176 light chain sequence

SEQ ID NO: 1256 - protein, 117 aa, synthetic construct; identical to SEQ ID NO: 247
  source 1..117: note = UGX176 heavy chain variable region sequence

SEQ ID NO: 1257 - protein, 107 aa, synthetic construct; identical to SEQ ID NO: 4
  source 1..107: note = UGX176 light chain variable region sequence

SEQ ID NO: 1258 - protein, 447 aa, synthetic construct; identical to SEQ ID NO: 1
  source 1..447: note = UGX177 heavy chain sequence

SEQ ID NO: 1259 - protein, 213 aa, synthetic construct
  source 1..213: note = UGX177 light chain sequence
AIQLTQSPSSLSASVGDRVTITCRASQGISEALVWYQQKPGKAPKLLIYFASSLESGVPSRFSGSGSGTDFTLTISSLQPEDFATYYCQQFNDYFTFGPGTKVDIKRTVAAPSVFIFPPSDEQLKSGTASVVCLLNNFYPREAKVQWKVDNALQSGNSQESVTEQDSKDSTYSLSSTLTLSKADYEKHKVYACEVTHQGLSSPVTKSFNRGEC

SEQ ID NO: 1260 - protein, 117 aa, synthetic construct; identical to SEQ ID NO: 3
  source 1..117: note = UGX177 heavy chain variable region sequence

SEQ ID NO: 1261 - protein, 107 aa, synthetic construct; identical to SEQ ID NO: 363
  source 1..107: note = UGX177 light chain variable region sequence

SEQ ID NO: 1262 - protein, 447 aa, synthetic construct
  source 1..447: note = UGX178 heavy chain sequence
QVQLVQSGAEVKKPGASVKVSCKASGYTFTFHYMHWVRQAPGQGLEWMGIINPISGSTFNAQKFQGRVTMTRDTSTSTVYMELSSLRSEDTAVYYCARDIVDAFDFWGQGTMVTVSSASTKGPSVFPLAPSSKSTSGGTAALGCLVKDYFPEPVTVSWNSGALTSGVHTFPAVLQSSGLYSLSSVVTVPSSSLGTQTYICNVNHKPSNTKVDKKVEPKSCDKTHTCPPCPAPELLGGPSVFLFPPKPKDTLMISRTPEVTCVVVDVSHEDPEVKFNWYVDGVEVHNAKTKPREEQYNSTYRVVSVLTVLHQDWLNGKEYKCKVSNKALPAPIEKTISKAKGQPREPQVYTLPPSRDELTKNQVSLTCLVKGFYPSDIAVEWESNGQPENNYKTTPPVLDSDGSFFLYSKLTVDKSRWQQGNVFSCSVMHEALHNHYTQKSLSLSPGK

SEQ ID NO: 1263 - protein, 213 aa, synthetic construct; identical to SEQ ID NO: 2
  source 1..213: note = UGX178 light chain sequence

SEQ ID NO: 1264 - protein, 117 aa, synthetic construct; identical to SEQ ID NO: 263
  source 1..117: note = UGX178 heavy chain variable region sequence

SEQ ID NO: 1265 - protein, 107 aa, synthetic construct; identical to SEQ ID NO: 4
  source 1..107: note = UGX178 light chain variable region sequence

SEQ ID NO: 1266 - protein, 447 aa, synthetic construct; identical to SEQ ID NO: 1
  source 1..447: note = UGX179 heavy chain sequence

SEQ ID NO: 1267 - protein, 213 aa, synthetic construct
  source 1..213: note = UGX179 light chain sequence
AIQLTQSPSSLSASVGDRVTITCRASQGISSALVWYQQKPGKAPKLLIYFASELESGVPSRFSGSGSGTDFTLTISSLQPEDFATYYCQQFNDYFTFGPGTKVDIKRTVAAPSVFIFPPSDEQLKSGTASVVCLLNNFYPREAKVQWKVDNALQSGNSQESVTEQDSKDSTYSLSSTLTLSKADYEKHKVYACEVTHQGLSSPVTKSFNRGEC

SEQ ID NO: 1268 - protein, 117 aa, synthetic construct; identical to SEQ ID NO: 3
  source 1..117: note = UGX179 heavy chain variable region sequence

SEQ ID NO: 1269 - protein, 107 aa, synthetic construct; identical to SEQ ID NO: 360
  source 1..107: note = UGX179 light chain variable region sequence

SEQ ID NO: 1270 - protein, 447 aa, synthetic construct; identical to SEQ ID NO: 1
  source 1..447: note = UGX180 heavy chain sequence

SEQ ID NO: 1271 - protein, 213 aa, synthetic construct
  source 1..213: note = UGX180 light chain sequence
AIQLTQSPSSLSASVGDRVTITCRASQGISFALVWYQQKPGKAPKLLIYDAESLESGVPSRFSGSGSGTDFTLTISSLQPEDFATYYCQQFNDYFTFGPGTKVDIKRTVAAPSVFIFPPSDEQLKSGTASVVCLLNNFYPREAKVQWKVDNALQSGNSQESVTEQDSKDSTYSLSSTLTLSKADYEKHKVYACEVTHQGLSSPVTKSFNRGEC

SEQ ID NO: 1272 - protein, 117 aa, synthetic construct; identical to SEQ ID NO: 3
  source 1..117: note = UGX180 heavy chain variable region sequence

SEQ ID NO: 1273 - protein, 107 aa, synthetic construct; identical to SEQ ID NO: 368
  source 1..107: note = UGX180 light chain variable region sequence

SEQ ID NO: 1274 - protein, 447 aa, synthetic construct; identical to SEQ ID NO: 1238
  source 1..447: note = UGX181 heavy chain sequence

SEQ ID NO: 1275 - protein, 213 aa, synthetic construct; identical to SEQ ID NO: 1087
  source 1..213: note = UGX181 light chain sequence

SEQ ID NO: 1276 - protein, 117 aa, synthetic construct; identical to SEQ ID NO: 238
  source 1..117: note = UGX181 heavy chain variable region sequence

SEQ ID NO: 1277 - protein, 107 aa, synthetic construct; identical to SEQ ID NO: 288
  source 1..107: note = UGX181 light chain variable region sequence

SEQ ID NO: 1278 - protein, 447 aa, synthetic construct
  source 1..447: note = UGX182 heavy chain sequence
QVQLVQSGAEVKKPGASVKVSCKASGYTFTNHYMHWVRQAPGQGLEWMGIINPISGSTDNAQKFQGRVTMTRDTSTSTVYMELSSLRSEDTAVYYCARDIIDAFDFWGQGTMVTVSSASTKGPSVFPLAPSSKSTSGGTAALGCLVKDYFPEPVTVSWNSGALTSGVHTFPAVLQSSGLYSLSSVVTVPSSSLGTQTYICNVNHKPSNTKVDKKVEPKSCDKTHTCPPCPAPELLGGPSVFLFPPKPKDTLMISRTPEVTCVVVDVSHEDPEVKFNWYVDGVEVHNAKTKPREEQYNSTYRVVSVLTVLHQDWLNGKEYKCKVSNKALPAPIEKTISKAKGQPREPQVYTLPPSRDELTKNQVSLTCLVKGFYPSDIAVEWESNGQPENNYKTTPPVLDSDGSFFLYSKLTVDKSRWQQGNVFSCSVMHEALHNHYTQKSLSLSPGK

SEQ ID NO: 1279 - protein, 213 aa, synthetic construct; identical to SEQ ID NO: 2
  source 1..213: note = UGX182 light chain sequence

SEQ ID NO: 1280 - protein, 117 aa, synthetic construct; identical to SEQ ID NO: 269
  source 1..117: note = UGX182 heavy chain variable region sequence

SEQ ID NO: 1281 - protein, 107 aa, synthetic construct; identical to SEQ ID NO: 4
  source 1..107: note = UGX182 light chain variable region sequence

SEQ ID NO: 1282 - protein, 447 aa, synthetic construct; identical to SEQ ID NO: 1
  source 1..447: note = UGX183 heavy chain sequence

SEQ ID NO: 1283 - protein, 213 aa, synthetic construct
  source 1..213: note = UGX183 light chain sequence
AIQLTQSPSSLSASVGDRVTITCRASQGISFALVWYQQKPGKAPKLLIYDASELESGVPSRFSGSGSGTDFTLTISSLQPEDFATYYCQQFNDYFTFGPGTKVDIKRTVAAPSVFIFPPSDEQLKSGTASVVCLLNNFYPREAKVQWKVDNALQSGNSQESVTEQDSKDSTYSLSSTLTLSKADYEKHKVYACEVTHQGLSSPVTKSFNRGEC

SEQ ID NO: 1284 - protein, 117 aa, synthetic construct; identical to SEQ ID NO: 3
  source 1..117: note = UGX183 heavy chain variable region sequence

SEQ ID NO: 1285 - protein, 107 aa, synthetic construct; identical to SEQ ID NO: 367
  source 1..107: note = UGX183 light chain variable region sequence

SEQ ID NO: 1286 - protein, 447 aa, synthetic construct; identical to SEQ ID NO: 1
  source 1..447: note = UGX184 heavy chain sequence

SEQ ID NO: 1287 - protein, 213 aa, synthetic construct
  source 1..213: note = UGX184 light chain sequence
AIQLTQSPSSLSASVGDRVTITCRASQGISSALVWYQQKPGKAPKLLIYDASSLESGVPSRFSGSGSGTDFTLTISSLQPEDFATYYCQQFEFYFTFGPGTKVDIKRTVAAPSVFIFPPSDEQLKSGTASVVCLLNNFYPREAKVQWKVDNALQSGNSQESVTEQDSKDSTYSLSSTLTLSKADYEKHKVYACEVTHQGLSSPVTKSFNRGEC

SEQ ID NO: 1288 - protein, 117 aa, synthetic construct; identical to SEQ ID NO: 3
  source 1..117: note = UGX184 heavy chain variable region sequence

SEQ ID NO: 1289 - protein, 107 aa, synthetic construct; identical to SEQ ID NO: 362
  source 1..107: note = UGX184 light chain variable region sequence

SEQ ID NO: 1290 - protein, 447 aa, synthetic construct; identical to SEQ ID NO: 1
  source 1..447: note = UGX185 heavy chain sequence

SEQ ID NO: 1291 - protein, 213 aa, synthetic construct
  source 1..213: note = UGX185 light chain sequence
AIQLTQSPSSLSASVGDRVTITCRASQGISEALVWYQQKPGKAPKLLIYDASELESGVPSRFSGSGSGTDFTLTISSLQPEDFATYYCQQFNDYFTFGPGTKVDIKRTVAAPSVFIFPPSDEQLKSGTASVVCLLNNFYPREAKVQWKVDNALQSGNSQESVTEQDSKDSTYSLSSTLTLSKADYEKHKVYACEVTHQGLSSPVTKSFNRGEC

SEQ ID NO: 1292 - protein, 117 aa, synthetic construct; identical to SEQ ID NO: 3
  source 1..117: note = UGX185 heavy chain variable region sequence

SEQ ID NO: 1293 - protein, 107 aa, synthetic construct; identical to SEQ ID NO: 365
  source 1..107: note = UGX185 light chain variable region sequence

SEQ ID NO: 1294 - protein, 447 aa, synthetic construct; identical to SEQ ID NO: 1
  source 1..447: note = UGX186 heavy chain sequence

SEQ ID NO: 1295 - protein, 213 aa, synthetic construct
  source 1..213: note = UGX186 light chain sequence
AIQLTQSPSSLSASVGDRVTITCRASQGISFALVWYQQKPGKAPKLLIYFASSLESGVPSRFSGSGSGTDFTLTISSLQPEDFATYYCQQFNDYFTFGPGTKVDIKRTVAAPSVFIFPPSDEQLKSGTASVVCLLNNFYPREAKVQWKVDNALQSGNSQESVTEQDSKDSTYSLSSTLTLSKADYEKHKVYACEVTHQGLSSPVTKSFNRGEC

SEQ ID NO: 1296 - protein, 117 aa, synthetic construct; identical to SEQ ID NO: 3
  source 1..117: note = UGX186 heavy chain variable region sequence

SEQ ID NO: 1297 - protein, 107 aa, synthetic construct; identical to SEQ ID NO: 366
  source 1..107: note = UGX186 light chain variable region sequence

SEQ ID NO: 1298 - protein, 447 aa, synthetic construct
  source 1..447: note = UGX187 heavy chain sequence
QVQLVQSGAEVKKPGASVKVSCKASGYTFTEHYMHWVRQAPGQGLEWMGIINPISGSTENAQKFQGRVTMTRDTSTSTVYMELSSLRSEDTAVYYCARDIVDAFDFWGQGTMVTVSSASTKGPSVFPLAPSSKSTSGGTAALGCLVKDYFPEPVTVSWNSGALTSGVHTFPAVLQSSGLYSLSSVVTVPSSSLGTQTYICNVNHKPSNTKVDKKVEPKSCDKTHTCPPCPAPELLGGPSVFLFPPKPKDTLMISRTPEVTCVVVDVSHEDPEVKFNWYVDGVEVHNAKTKPREEQYNSTYRVVSVLTVLHQDWLNGKEYKCKVSNKALPAPIEKTISKAKGQPREPQVYTLPPSRDELTKNQVSLTCLVKGFYPSDIAVEWESNGQPENNYKTTPPVLDSDGSFFLYSKLTVDKSRWQQGNVFSCSVMHEALHNHYTQKSLSLSPGK

SEQ ID NO: 1299 - protein, 213 aa, synthetic construct; identical to SEQ ID NO: 2
  source 1..213: note = UGX187 light chain sequence

SEQ ID NO: 1300 - protein, 117 aa, synthetic construct; identical to SEQ ID NO: 265
  source 1..117: note = UGX187 heavy chain variable region sequence

SEQ ID NO: 1301 - protein, 107 aa, synthetic construct; identical to SEQ ID NO: 4
  source 1..107: note = UGX187 light chain variable region sequence

SEQ ID NO: 1302 - protein, 447 aa, synthetic construct
  source 1..447: note = UGX188 heavy chain sequence
QVQLVQSGAEVKKPGASVKVSCKASGYTFTNHYMHWVRQAPGQGLEWMGIINPISGETDNAQKFQGRVTMTRDTSTSTVYMELSSLRSEDTAVYYCARDIVDAFDFWGQGTMVTVSSASTKGPSVFPLAPSSKSTSGGTAALGCLVKDYFPEPVTVSWNSGALTSGVHTFPAVLQSSGLYSLSSVVTVPSSSLGTQTYICNVNHKPSNTKVDKKVEPKSCDKTHTCPPCPAPELLGGPSVFLFPPKPKDTLMISRTPEVTCVVVDVSHEDPEVKFNWYVDGVEVHNAKTKPREEQYNSTYRVVSVLTVLHQDWLNGKEYKCKVSNKALPAPIEKTISKAKGQPREPQVYTLPPSRDELTKNQVSLTCLVKGFYPSDIAVEWESNGQPENNYKTTPPVLDSDGSFFLYSKLTVDKSRWQQGNVFSCSVMHEALHNHYTQKSLSLSPGK

SEQ ID NO: 1303 - protein, 213 aa, synthetic construct; identical to SEQ ID NO: 2
  source 1..213: note = UGX188 light chain sequence

SEQ ID NO: 1304 - protein, 117 aa, synthetic construct; identical to SEQ ID NO: 260
  source 1..117: note = UGX188 heavy chain variable region sequence

SEQ ID NO: 1305 - protein, 107 aa, synthetic construct; identical to SEQ ID NO: 4
  source 1..107: note = UGX188 light chain variable region sequence

SEQ ID NO: 1306 - protein, 447 aa, synthetic construct
  source 1..447: note = UGX189 heavy chain sequence
QVQLVQSGAEVKKPGASVKVSCKASGYTFTEHYMHWVRQAPGQGLEWMGIINPFSGSTSNAQKFQGRVTMTRDTSTSTVYMELSSLRSEDTAVYYCARDIVDAFDFWGQGTMVTVSSASTKGPSVFPLAPSSKSTSGGTAALGCLVKDYFPEPVTVSWNSGALTSGVHTFPAVLQSSGLYSLSSVVTVPSSSLGTQTYICNVNHKPSNTKVDKKVEPKSCDKTHTCPPCPAPELLGGPSVFLFPPKPKDTLMISRTPEVTCVVVDVSHEDPEVKFNWYVDGVEVHNAKTKPREEQYNSTYRVVSVLTVLHQDWLNGKEYKCKVSNKALPAPIEKTISKAKGQPREPQVYTLPPSRDELTKNQVSLTCLVKGFYPSDIAVEWESNGQPENNYKTTPPVLDSDGSFFLYSKLTVDKSRWQQGNVFSCSVMHEALHNHYTQKSLSLSPGK

SEQ ID NO: 1307 - protein, 213 aa, synthetic construct; identical to SEQ ID NO: 2
  source 1..213: note = UGX189 light chain sequence

SEQ ID NO: 1308 - protein, 117 aa, synthetic construct; identical to SEQ ID NO: 266
  source 1..117: note = UGX189 heavy chain variable region sequence

SEQ ID NO: 1309 - protein, 107 aa, synthetic construct; identical to SEQ ID NO: 4
  source 1..107: note = UGX189 light chain variable region sequence

SEQ ID NO: 1310 - protein, 447 aa, synthetic construct
  source 1..447: note = UGX190 heavy chain sequence
QVQLVQSGAEVKKPGASVKVSCKASGYTFTNHYMHWVRQAPGQGLEWMGIINPISGSTTNAQKFQGRVTMTRDTSTSTVYMELSSLRSEDTAVYYCARDILDAFDFWGQGTMVTVSSASTKGPSVFPLAPSSKSTSGGTAALGCLVKDYFPEPVTVSWNSGALTSGVHTFPAVLQSSGLYSLSSVVTVPSSSLGTQTYICNVNHKPSNTKVDKKVEPKSCDKTHTCPPCPAPELLGGPSVFLFPPKPKDTLMISRTPEVTCVVVDVSHEDPEVKFNWYVDGVEVHNAKTKPREEQYNSTYRVVSVLTVLHQDWLNGKEYKCKVSNKALPAPIEKTISKAKGQPREPQVYTLPPSRDELTKNQVSLTCLVKGFYPSDIAVEWESNGQPENNYKTTPPVLDSDGSFFLYSKLTVDKSRWQQGNVFSCSVMHEALHNHYTQKSLSLSPGK

SEQ ID NO: 1311 - protein, 213 aa, synthetic construct; identical to SEQ ID NO: 2
  source 1..213: note = UGX190 light chain sequence

SEQ ID NO: 1312 - protein, 117 aa, synthetic construct; identical to SEQ ID NO: 270
  source 1..117: note = UGX190 heavy chain variable region sequence

SEQ ID NO: 1313 - protein, 107 aa, synthetic construct; identical to SEQ ID NO: 4
  source 1..107: note = UGX190 light chain variable region sequence

SEQ ID NO: 1314 - protein, 447 aa, synthetic construct
  source 1..447: note = UGX191 heavy chain sequence
QVQLVQSGAEVKKPGASVKVSCKASGYTFTNHYMHWVRQAPGQGLEWMGIINPYSGSTSNAQKFQGRVTMTRDTSTSTVYMELSSLRSEDTAVYYCARDIFDAFDFWGQGTMVTVSSASTKGPSVFPLAPSSKSTSGGTAALGCLVKDYFPEPVTVSWNSGALTSGVHTFPAVLQSSGLYSLSSVVTVPSSSLGTQTYICNVNHKPSNTKVDKKVEPKSCDKTHTCPPCPAPELLGGPSVFLFPPKPKDTLMISRTPEVTCVVVDVSHEDPEVKFNWYVDGVEVHNAKTKPREEQYNSTYRVVSVLTVLHQDWLNGKEYKCKVSNKALPAPIEKTISKAKGQPREPQVYTLPPSRDELTKNQVSLTCLVKGFYPSDIAVEWESNGQPENNYKTTPPVLDSDGSFFLYSKLTVDKSRWQQGNVFSCSVMHEALHNHYTQKSLSLSPGK

SEQ ID NO: 1315 - protein, 213 aa, synthetic construct; identical to SEQ ID NO: 2
  source 1..213: note = UGX191 light chain sequence

SEQ ID NO: 1316 - protein, 117 aa, synthetic construct; identical to SEQ ID NO: 262
  source 1..117: note = UGX191 heavy chain variable region sequence

SEQ ID NO: 1317 - protein, 107 aa, synthetic construct; identical to SEQ ID NO: 4
  source 1..107: note = UGX191 light chain variable region sequence

SEQ ID NO: 1318 - protein, 447 aa, synthetic construct
  source 1..447: note = UGX192 heavy chain sequence
QVQLVQSGAEVKKPGASVKVSCKASGYTFTNHYMHWVRQAPGQGLEWMGIIFPISGSTSNAQKFQGRVTMTRDTSTSTVYMELSSLRSEDTAVYYCARDIIDAFDFWGQGTMVTVSSASTKGPSVFPLAPSSKSTSGGTAALGCLVKDYFPEPVTVSWNSGALTSGVHTFPAVLQSSGLYSLSSVVTVPSSSLGTQTYICNVNHKPSNTKVDKKVEPKSCDKTHTCPPCPAPELLGGPSVFLFPPKPKDTLMISRTPEVTCVVVDVSHEDPEVKFNWYVDGVEVHNAKTKPREEQYNSTYRVVSVLTVLHQDWLNGKEYKCKVSNKALPAPIEKTISKAKGQPREPQVYTLPPSRDELTKNQVSLTCLVKGFYPSDIAVEWESNGQPENNYKTTPPVLDSDGSFFLYSKLTVDKSRWQQGNVFSCSVMHEALHNHYTQKSLSLSPGK

SEQ ID NO: 1319 - protein, 213 aa, synthetic construct; identical to SEQ ID NO: 2
  source 1..213: note = UGX192 light chain sequence

SEQ ID NO: 1320 - protein, 117 aa, synthetic construct; identical to SEQ ID NO: 267
  source 1..117: note = UGX192 heavy chain variable region sequence

SEQ ID NO: 1321 - protein, 107 aa, synthetic construct; identical to SEQ ID NO: 4
  source 1..107: note = UGX192 light chain variable region sequence

SEQ ID NO: 1322 - protein, 447 aa, synthetic construct; identical to SEQ ID NO: 1
  source 1..447: note = UGX193 heavy chain sequence

SEQ ID NO: 1323 - protein, 213 aa, synthetic construct
  source 1..213: note = UGX193 light chain sequence
AIQLTQSPSSLSASVGDRVTITCRASQGISSALVWYQQKPGKAPKLLIYDASSLESGVPSRFSGSGSGTDFTLTISSLQPEDFATYYCQQFDFYFTFGPGTKVDIKRTVAAPSVFIFPPSDEQLKSGTASVVCLLNNFYPREAKVQWKVDNALQSGNSQESVTEQDSKDSTYSLSSTLTLSKADYEKHKVYACEVTHQGLSSPVTKSFNRGEC

SEQ ID NO: 1324 - protein, 117 aa, synthetic construct; identical to SEQ ID NO: 3
  source 1..117: note = UGX193 heavy chain variable region sequence

SEQ ID NO: 1325 - protein, 107 aa, synthetic construct; identical to SEQ ID NO: 361
  source 1..107: note = UGX193 light chain variable region sequence

SEQ ID NO: 1326 - protein, 447 aa, synthetic construct
  source 1..447: note = UGX194 heavy chain sequence
QVQLVQSGAEVKKPGASVKVSCKASGYTFTNHYMHWVRQAPGQGLEWMGIIFPISGSTSNAQKFQGRVTMTRDTSTSTVYMELSSLRSEDTAVYYCARDILDAFDFWGQGTMVTVSSASTKGPSVFPLAPSSKSTSGGTAALGCLVKDYFPEPVTVSWNSGALTSGVHTFPAVLQSSGLYSLSSVVTVPSSSLGTQTYICNVNHKPSNTKVDKKVEPKSCDKTHTCPPCPAPELLGGPSVFLFPPKPKDTLMISRTPEVTCVVVDVSHEDPEVKFNWYVDGVEVHNAKTKPREEQYNSTYRVVSVLTVLHQDWLNGKEYKCKVSNKALPAPIEKTISKAKGQPREPQVYTLPPSRDELTKNQVSLTCLVKGFYPSDIAVEWESNGQPENNYKTTPPVLDSDGSFFLYSKLTVDKSRWQQGNVFSCSVMHEALHNHYTQKSLSLSPGK

SEQ ID NO: 1327 - protein, 213 aa, synthetic construct; identical to SEQ ID NO: 2
  source 1..213: note = UGX194 light chain sequence

SEQ ID NO: 1328 - protein, 117 aa, synthetic construct; identical to SEQ ID NO: 268
  source 1..117: note = UGX194 heavy chain variable region sequence

SEQ ID NO: 1329 - protein, 107 aa, synthetic construct; identical to SEQ ID NO: 4
  source 1..107: note = UGX194 light chain variable region sequence

SEQ ID NO: 1330 - protein, 447 aa, synthetic construct; identical to SEQ ID NO: 1
  source 1..447: note = UGX195 heavy chain sequence

SEQ ID NO: 1331 - protein, 213 aa, synthetic construct
  source 1..213: note = UGX195 light chain sequence
AIQLTQSPSSLSASVGDRVTITCRASQGISFALVWYQQKPGKAPKLLIYEASSLESGVPSRFSGSGSGTDFTLTISSLQPEDFATYYCQQFNDYFTFGPGTKVDIKRTVAAPSVFIFPPSDEQLKSGTASVVCLLNNFYPREAKVQWKVDNALQSGNSQESVTEQDSKDSTYSLSSTLTLSKADYEKHKVYACEVTHQGLSSPVTKSFNRGEC

SEQ ID NO: 1332 - protein, 117 aa, synthetic construct; identical to SEQ ID NO: 3
  source 1..117: note = UGX195 heavy chain variable region sequence

SEQ ID NO: 1333 - protein, 107 aa, synthetic construct; identical to SEQ ID NO: 364
  source 1..107: note = UGX195 light chain variable region sequence

SEQ ID NO: 1334 - protein, 447 aa, synthetic construct; identical to SEQ ID NO: 1206
  source 1..447: note = UGX196 heavy chain sequence

SEQ ID NO: 1335 - protein, 213 aa, synthetic construct; identical to SEQ ID NO: 1155
  source 1..213: note = UGX196 light chain sequence

SEQ ID NO: 1336 - protein, 117 aa, synthetic construct; identical to SEQ ID NO: 214
  source 1..117: note = UGX196 heavy chain variable region sequence

SEQ ID NO: 1337 - protein, 107 aa, synthetic construct; identical to SEQ ID NO: 340
  source 1..107: note = UGX196 light chain variable region sequence

SEQ ID NO: 1338 - protein, 447 aa, synthetic construct; identical to SEQ ID NO: 1210
  source 1..447: note = UGX201 heavy chain sequence

SEQ ID NO: 1339 - protein, 213 aa, synthetic construct; identical to SEQ ID NO: 645
  source 1..213: note = UGX201 light chain sequence

SEQ ID NO: 1340 - protein, 117 aa, synthetic construct; identical to SEQ ID NO: 215
  source 1..117: note = UGX201 heavy chain variable region sequence

SEQ ID NO: 1341 - protein, 107 aa, synthetic construct; identical to SEQ ID NO: 325
  source 1..107: note = UGX201 light chain variable region sequence

SEQ ID NO: 1342 - protein, 447 aa, synthetic construct; identical to SEQ ID NO: 1210
  source 1..447: note = UGX202 heavy chain sequence

SEQ ID NO: 1343 - protein, 213 aa, synthetic construct; identical to SEQ ID NO: 648
  source 1..213: note = UGX202 light chain sequence

SEQ ID NO: 1344 - protein, 117 aa, synthetic construct; identical to SEQ ID NO: 215
  source 1..117: note = UGX202 heavy chain variable region sequence

SEQ ID NO: 1345 - protein, 107 aa, synthetic construct; identical to SEQ ID NO: 329
  source 1..107: note = UGX202 light chain variable region sequence

SEQ ID NO: 1346 - protein, 447 aa, synthetic construct; identical to SEQ ID NO: 1210
  source 1..447: note = UGX203 heavy chain sequence

SEQ ID NO: 1347 - protein, 213 aa, synthetic construct; identical to SEQ ID NO: 1111
  source 1..213: note = UGX203 light chain sequence

SEQ ID NO: 1348 - protein, 117 aa, synthetic construct; identical to SEQ ID NO: 215
  source 1..117: note = UGX203 heavy chain variable region sequence

SEQ ID NO: 1349 - protein, 107 aa, synthetic construct; identical to SEQ ID NO: 303
  source 1..107: note = UGX203 light chain variable region sequence

SEQ ID NO: 1350 - protein, 447 aa, synthetic construct; identical to SEQ ID NO: 1210
  source 1..447: note = UGX204 heavy chain sequence

SEQ ID NO: 1351 - protein, 213 aa, synthetic construct; identical to SEQ ID NO: 627
  source 1..213: note = UGX204 light chain sequence

SEQ ID NO: 1352 - protein, 117 aa, synthetic construct; identical to SEQ ID NO: 215
  source 1..117: note = UGX204 heavy chain variable region sequence

SEQ ID NO: 1353 - protein, 107 aa, synthetic construct; identical to SEQ ID NO: 306
  source 1..107: note = UGX204 light chain variable region sequence

SEQ ID NO: 1354 - protein, 447 aa, synthetic construct; identical to SEQ ID NO: 1210
  source 1..447: note = UGX205 heavy chain sequence

SEQ ID NO: 1355 - protein, 213 aa, synthetic construct; identical to SEQ ID NO: 1155
  source 1..213: note = UGX205 light chain sequence

SEQ ID NO: 1356 - protein, 117 aa, synthetic construct; identical to SEQ ID NO: 215
  source 1..117: note = UGX205 heavy chain variable region sequence

SEQ ID NO: 1357 - protein, 107 aa, synthetic construct; identical to SEQ ID NO: 340
  source 1..107: note = UGX205 light chain variable region sequence

SEQ ID NO: 1358 - protein, 447 aa, synthetic construct; identical to SEQ ID NO: 1210
  source 1..447: note = UGX206 heavy chain sequence

SEQ ID NO: 1359 - protein, 213 aa, synthetic construct; identical to SEQ ID NO: 652
  source 1..213: note = UGX206 light chain sequence

SEQ ID NO: 1360 - protein, 117 aa, synthetic construct; identical to SEQ ID NO: 215
  source 1..117: note = UGX206 heavy chain variable region sequence

SEQ ID NO: 1361 - protein, 107 aa, synthetic construct; identical to SEQ ID NO: 341
  source 1..107: note = UGX206 light chain variable region sequence

SEQ ID NO: 1362 - protein, 447 aa, synthetic construct; identical to SEQ ID NO: 1222
  source 1..447: note = UGX302 heavy chain sequence

SEQ ID NO: 1363 - protein, 213 aa, synthetic construct; identical to SEQ ID NO: 1155
  source 1..213: note = UGX302 light chain sequence

SEQ ID NO: 1364 - protein, 117 aa, synthetic construct; identical to SEQ ID NO: 222
  source 1..117: note = UGX302 heavy chain variable region sequence

SEQ ID NO: 1365 - protein, 107 aa, synthetic construct; identical to SEQ ID NO: 340
  source 1..107: note = UGX302 light chain variable region sequence

SEQ ID NO: 1366 - protein, 447 aa, synthetic construct; identical to SEQ ID NO: 1206
  source 1..447: note = UGX303 heavy chain sequence

SEQ ID NO: 1367 - protein, 213 aa, synthetic construct; identical to SEQ ID NO: 652
  source 1..213: note = UGX303 light chain sequence

SEQ ID NO: 1368 - protein, 117 aa, synthetic construct; identical to SEQ ID NO: 214
  source 1..117: note = UGX303 heavy chain variable region sequence

SEQ ID NO: 1369 - protein, 107 aa, synthetic construct; identical to SEQ ID NO: 341
  source 1..107: note = UGX303 light chain variable region sequence

SEQ ID NO: 1370 - protein, 447 aa, synthetic construct; identical to SEQ ID NO: 1222
  source 1..447: note = UGX304 heavy chain sequence

SEQ ID NO: 1371 - protein, 213 aa, synthetic construct; identical to SEQ ID NO: 652
  source 1..213: note = UGX304 light chain sequence

SEQ ID NO: 1372 - protein, 117 aa, synthetic construct; identical to SEQ ID NO: 222
  source 1..117: note = UGX304 heavy chain variable region sequence

SEQ ID NO: 1373 - protein, 107 aa, synthetic construct; identical to SEQ ID NO: 341
  source 1..107: note = UGX304 light chain variable region sequence

SEQ ID NO: 1374 - protein, 447 aa, synthetic construct; identical to SEQ ID NO: 1206
  source 1..447: note = UGX305 heavy chain sequence

SEQ ID NO: 1375 - protein, 213 aa, synthetic construct
  source 1..213: note = UGX305 light chain sequence
AIQLTQSPSSLSASVGDRVTITCRASQGISSALVWYQQKPGKAPKLLIYDASSLESGVPSRFSGSGSGTDFTLTISSLQPEDFATYYCQQFNDQFTFGPGTKVDIKRTVAAPSVFIFPPSDEQLKSGTASVVCLLNNFYPREAKVQWKVDNALQSGNSQESVTEQDSKDSTYSLSSTLTLSKADYEKHKVYACEVTHQGLSSPVTKSFNRGEC

SEQ ID NO: 1376 - protein, 117 aa, synthetic construct; identical to SEQ ID NO: 214
  source 1..117: note = UGX305 heavy chain variable region sequence

SEQ ID NO: 1377 - protein, 107 aa, synthetic construct; identical to SEQ ID NO: 358
  source 1..107: note = UGX305 light chain variable region sequence

SEQ ID NO: 1378 - protein, 447 aa, synthetic construct; identical to SEQ ID NO: 1210
  source 1..447: note = UGX306 heavy chain sequence

SEQ ID NO: 1379 - protein, 213 aa, synthetic construct; identical to SEQ ID NO: 1375
  source 1..213: note = UGX306 light chain sequence

SEQ ID NO: 1380 - protein, 117 aa, synthetic construct; identical to SEQ ID NO: 215
  source 1..117: note = UGX306 heavy chain variable region sequence

SEQ ID NO: 1381 - protein, 107 aa, synthetic construct; identical to SEQ ID NO: 358
  source 1..107: note = UGX306 light chain variable region sequence

SEQ ID NO: 1382 - protein, 447 aa, synthetic construct; identical to SEQ ID NO: 1222
  source 1..447: note = UGX307 heavy chain sequence

SEQ ID NO: 1383 - protein, 213 aa, synthetic construct; identical to SEQ ID NO: 1375
  source 1..213: note = UGX307 light chain sequence

SEQ ID NO: 1384 - protein, 117 aa, synthetic construct; identical to SEQ ID NO: 222
  source 1..117: note = UGX307 heavy chain variable region sequence

SEQ ID NO: 1385 - protein, 107 aa, synthetic construct; identical to SEQ ID NO: 358
  source 1..107: note = UGX307 light chain variable region sequence

SEQ ID NO: 1386 - protein, 447 aa, synthetic construct
  source 1..447: note = UGX308 heavy chain sequence
QVQLVQSGAEVKKPGASVKVSCKASGYTFTNHYMHWVRQAPGQGLEWMGIINPYSGSTENAQKFQGRVTMTRDTSTSTVYMELSSLRSEDTAVYYCARDIVDAFDFWGQGTMVTVSSASTKGPSVFPLAPSSKSTSGGTAALGCLVKDYFPEPVTVSWNSGALTSGVHTFPAVLQSSGLYSLSSVVTVPSSSLGTQTYICNVNHKPSNTKVDKKVEPKSCDKTHTCPPCPAPELLGGPSVFLFPPKPKDTLMISRTPEVTCVVVDVSHEDPEVKFNWYVDGVEVHNAKTKPREEQYNSTYRVVSVLTVLHQDWLNGKEYKCKVSNKALPAPIEKTISKAKGQPREPQVYTLPPSRDELTKNQVSLTCLVKGFYPSDIAVEWESNGQPENNYKTTPPVLDSDGSFFLYSKLTVDKSRWQQGNVFSCSVMHEALHNHYTQKSLSLSPGK

SEQ ID NO: 1387 - protein, 213 aa, synthetic construct; identical to SEQ ID NO: 2
  source 1..213: note = UGX308 light chain sequence

SEQ ID NO: 1388 - protein, 117 aa, synthetic construct
  source 1..117: note = UGX308 heavy chain variable region sequence
QVQLVQSGAEVKKPGASVKVSCKASGYTFTNHYMHWVRQAPGQGLEWMGIINPYSGSTENAQKFQGRVTMTRDTSTSTVYMELSSLRSEDTAVYYCARDIVDAFDFWGQGTMVTVSS

SEQ ID NO: 1389 - protein, 107 aa, synthetic construct; identical to SEQ ID NO: 4
  source 1..107: note = UGX308 light chain variable region sequence

SEQ ID NO: 1390 - protein, 447 aa, synthetic construct
  source 1..447: note = UGX309 heavy chain sequence
QVQLVQSGAEVKKPGASVKVSCKASGYTFTNHYMHWVRQAPGQGLEWMGIINPYSGSTDNAQKFQGRVTMTRDTSTSTVYMELSSLRSEDTAVYYCARDIVDAFDFWGQGTMVTVSSASTKGPSVFPLAPSSKSTSGGTAALGCLVKDYFPEPVTVSWNSGALTSGVHTFPAVLQSSGLYSLSSVVTVPSSSLGTQTYICNVNHKPSNTKVDKKVEPKSCDKTHTCPPCPAPELLGGPSVFLFPPKPKDTLMISRTPEVTCVVVDVSHEDPEVKFNWYVDGVEVHNAKTKPREEQYNSTYRVVSVLTVLHQDWLNGKEYKCKVSNKALPAPIEKTISKAKGQPREPQVYTLPPSRDELTKNQVSLTCLVKGFYPSDIAVEWESNGQPENNYKTTPPVLDSDGSFFLYSKLTVDKSRWQQGNVFSCSVMHEALHNHYTQKSLSLSPGK

SEQ ID NO: 1391 - protein, 213 aa, synthetic construct; identical to SEQ ID NO: 2
  source 1..213: note = UGX309 light chain sequence

SEQ ID NO: 1392 - protein, 117 aa, synthetic construct
  source 1..117: note = UGX309 heavy chain variable region sequence
QVQLVQSGAEVKKPGASVKVSCKASGYTFTNHYMHWVRQAPGQGLEWMGIINPYSGSTDNAQKFQGRVTMTRDTSTSTVYMELSSLRSEDTAVYYCARDIVDAFDFWGQGTMVTVSS

SEQ ID NO: 1393 - protein, 107 aa, synthetic construct; identical to SEQ ID NO: 4
  source 1..107: note = UGX309 light chain variable region sequence

SEQ ID NO: 1394 - protein, 447 aa, synthetic construct
  source 1..447: note = UGX310 heavy chain sequence
QVQLVQSGAEVKKPGASVKVSCKASGYTFTNHYMHWVRQAPGQGLEWMGIINPYSGSTQNAQKFQGRVTMTRDTSTSTVYMELSSLRSEDTAVYYCARDIVDAFDFWGQGTMVTVSSASTKGPSVFPLAPSSKSTSGGTAALGCLVKDYFPEPVTVSWNSGALTSGVHTFPAVLQSSGLYSLSSVVTVPSSSLGTQTYICNVNHKPSNTKVDKKVEPKSCDKTHTCPPCPAPELLGGPSVFLFPPKPKDTLMISRTPEVTCVVVDVSHEDPEVKFNWYVDGVEVHNAKTKPREEQYNSTYRVVSVLTVLHQDWLNGKEYKCKVSNKALPAPIEKTISKAKGQPREPQVYTLPPSRDELTKNQVSLTCLVKGFYPSDIAVEWESNGQPENNYKTTPPVLDSDGSFFLYSKLTVDKSRWQQGNVFSCSVMHEALHNHYTQKSLSLSPGK

SEQ ID NO: 1395 - protein, 213 aa, synthetic construct; identical to SEQ ID NO: 2
  source 1..213: note = UGX310 light chain sequence

SEQ ID NO: 1396 - protein, 117 aa, synthetic construct
  source 1..117: note = UGX310 heavy chain variable region sequence
QVQLVQSGAEVKKPGASVKVSCKASGYTFTNHYMHWVRQAPGQGLEWMGIINPYSGSTQNAQKFQGRVTMTRDTSTSTVYMELSSLRSEDTAVYYCARDIVDAFDFWGQGTMVTVSS

SEQ ID NO: 1397 - protein, 107 aa, synthetic construct; identical to SEQ ID NO: 4
  source 1..107: note = UGX310 light chain variable region sequence

SEQ ID NO: 1398 - protein, 447 aa, synthetic construct; identical to SEQ ID NO: 1202
  source 1..447: note = UGX311 heavy chain sequence

SEQ ID NO: 1399 - protein, 213 aa, synthetic construct; identical to SEQ ID NO: 1155
  source 1..213: note = UGX311 light chain sequence

SEQ ID NO: 1400 - protein, 117 aa, synthetic construct; identical to SEQ ID NO: 213
  source 1..117: note = UGX311 heavy chain variable region sequence

SEQ ID NO: 1401 - protein, 107 aa, synthetic construct; identical to SEQ ID NO: 340
  source 1..107: note = UGX311 light chain variable region sequence

SEQ ID NO: 1402 - protein, 447 aa, synthetic construct; identical to SEQ ID NO: 1202
  source 1..447: note = UGX312 heavy chain sequence

SEQ ID NO: 1403 - protein, 213 aa, synthetic construct; identical to SEQ ID NO: 652
  source 1..213: note = UGX312 light chain sequence

SEQ ID NO: 1404 - protein, 117 aa, synthetic construct; identical to SEQ ID NO: 213
  source 1..117: note = UGX312 heavy chain variable region sequence

SEQ ID NO: 1405 - protein, 107 aa, synthetic construct; identical to SEQ ID NO: 341
  source 1..107: note = UGX312 light chain variable region sequence

SEQ ID NO: 1406 - protein, 447 aa, synthetic construct; identical to SEQ ID NO: 1202
  source 1..447: note = UGX313 heavy chain sequence

SEQ ID NO: 1407 - protein, 213 aa, synthetic construct; identical to SEQ ID NO: 1375
  source 1..213: note = UGX313 light chain sequence

SEQ ID NO: 1408 - protein, 117 aa, synthetic construct; identical to SEQ ID NO: 213
  source 1..117: note = UGX313 heavy chain variable region sequence

SEQ ID NO: 1409 - protein, 107 aa, synthetic construct; identical to SEQ ID NO: 358
  source 1..107: note = UGX313 light chain variable region sequence

SEQ ID NO: 1410 - protein, 447 aa, synthetic construct; identical to SEQ ID NO: 1206
  source 1..447: note = UGX314 heavy chain sequence

SEQ ID NO: 1411 - protein, 213 aa, synthetic construct; identical to SEQ ID NO: 648
  source 1..213: note = UGX314 light chain sequence

SEQ ID NO: 1412 - protein, 117 aa, synthetic construct; identical to SEQ ID NO: 214
  source 1..117: note = UGX314 heavy chain variable region sequence

SEQ ID NO: 1413 - protein, 107 aa, synthetic construct; identical to SEQ ID NO: 329
  source 1..107: note = UGX314 light chain variable region sequence

SEQ ID NO: 1414 - protein, 447 aa, synthetic construct; identical to SEQ ID NO: 1222
  source 1..447: note = UGX315 heavy chain sequence

SEQ ID NO: 1415 - protein, 213 aa, synthetic construct; identical to SEQ ID NO: 648
  source 1..213: note = UGX315 light chain sequence

SEQ ID NO: 1416 - protein, 117 aa, synthetic construct; identical to SEQ ID NO: 222
  source 1..117: note = UGX315 heavy chain variable region sequence

SEQ ID NO: 1417 - protein, 107 aa, synthetic construct; identical to SEQ ID NO: 329
  source 1..107: note = UGX315 light chain variable region sequence

SEQ ID NO: 1418 - protein, 447 aa, synthetic construct; identical to SEQ ID NO: 1206
  source 1..447: note = UGX316 heavy chain sequence

SEQ ID NO: 1419 - protein, 213 aa, synthetic construct; identical to SEQ ID NO: 645
  source 1..213: note = UGX316 light chain sequence

SEQ ID NO: 1420 - protein, 117 aa, synthetic construct; identical to SEQ ID NO: 214
  source 1..117: note = UGX316 heavy chain variable region sequence

SEQ ID NO: 1421 - protein, 107 aa, synthetic construct; identical to SEQ ID NO: 325
  source 1..107: note = UGX316 light chain variable region sequence

SEQ ID NO: 1422 - protein, 447 aa, synthetic construct; identical to SEQ ID NO: 1222
  source 1..447: note = UGX317 heavy chain sequence

SEQ ID NO: 1423 - protein, 213 aa, synthetic construct; identical to SEQ ID NO: 645
  source 1..213: note = UGX317 light chain sequence

SEQ ID NO: 1424 - protein, 117 aa, synthetic construct; identical to SEQ ID NO: 222
  source 1..117: note = UGX317 heavy chain variable region sequence

SEQ ID NO: 1425 - protein, 107 aa, synthetic construct; identical to SEQ ID NO: 325
  source 1..107: note = UGX317 light chain variable region sequence

SEQ ID NO: 1426 - protein, 447 aa, synthetic construct; identical to SEQ ID NO: 1206
  source 1..447: note = UGX318 heavy chain sequence

SEQ ID NO: 1427 - protein, 213 aa, synthetic construct
  source 1..213: note = UGX318 light chain sequence
AIQLTQSPSSLSASVGDRVTITCRASQGISSALVWYQQKPGKAPKLLIYDASSLESGVPSRFSGSGSGTDFTLTISSLQPEDFATYYCQQFLDYFTFGPGTKVDIKRTVAAPSVFIFPPSDEQLKSGTASVVCLLNNFYPREAKVQWKVDNALQSGNSQESVTEQDSKDSTYSLSSTLTLSKADYEKHKVYACEVTHQGLSSPVTKSFNRGEC

SEQ ID NO: 1428 - protein, 117 aa, synthetic construct; identical to SEQ ID NO: 214
  source 1..117: note = UGX318 heavy chain variable region sequence

SEQ ID NO: 1429 - protein, 107 aa, synthetic construct
  source 1..107: note = UGX318 light chain variable region sequence
AIQLTQSPSSLSASVGDRVTITCRASQGISSALVWYQQKPGKAPKLLIYDASSLESGVPSRFSGSGSGTDFTLTISSLQPEDFATYYCQQFLDYFTFGPGTKVDIKR

SEQ ID NO: 1430 - protein, 447 aa, synthetic construct; identical to SEQ ID NO: 1210
  source 1..447: note = UGX319 heavy chain sequence

SEQ ID NO: 1431 - protein, 213 aa, synthetic construct; identical to SEQ ID NO: 1427
  source 1..213: note = UGX319 light chain sequence

SEQ ID NO: 1432 - protein, 117 aa, synthetic construct; identical to SEQ ID NO: 215
  source 1..117: note = UGX319 heavy chain variable region sequence

SEQ ID NO: 1433 - protein, 107 aa, synthetic construct; identical to SEQ ID NO: 1429
  source 1..107: note = UGX319 light chain variable region sequence

SEQ ID NO: 1434 - protein, 447 aa, synthetic construct; identical to SEQ ID NO: 1222
  source 1..447: note = UGX320 heavy chain sequence

SEQ ID NO: 1435 - protein, 213 aa, synthetic construct; identical to SEQ ID NO: 1427
  source 1..213: note = UGX320 light chain sequence

SEQ ID NO: 1436 - protein, 117 aa, synthetic construct; identical to SEQ ID NO: 222
  source 1..117: note = UGX320 heavy chain variable region sequence

SEQ ID NO: 1437 - protein, 107 aa, synthetic construct; identical to SEQ ID NO: 1429
  source 1..107: note = UGX320 light chain variable region sequence

SEQ ID NO: 1438 - protein, 447 aa, synthetic construct; identical to SEQ ID NO: 1206
  source 1..447: note = UGX321 heavy chain sequence

SEQ ID NO: 1439 - protein, 213 aa, synthetic construct
  source 1..213: note = UGX321 light chain sequence
AIQLTQSPSSLSASVGDRVTITCRASQGISSALVWYQQKPGKAPKLLIYDASSLESGVPSRFSGSGSGTDFTLTISSLQPEDFATYYCQQFIDYFTFGPGTKVDIKRTVAAPSVFIFPPSDEQLKSGTASVVCLLNNFYPREAKVQWKVDNALQSGNSQESVTEQDSKDSTYSLSSTLTLSKADYEKHKVYACEVTHQGLSSPVTKSFNRGEC

SEQ ID NO: 1440 - protein, 117 aa, synthetic construct; identical to SEQ ID NO: 214
  source 1..117: note = UGX321 heavy chain variable region sequence

SEQ ID NO: 1441 - protein, 107 aa, synthetic construct
  source 1..107: note = UGX321 light chain variable region sequence
AIQLTQSPSSLSASVGDRVTITCRASQGISSALVWYQQKPGKAPKLLIYDASSLESGVPSRFSGSGSGTDFTLTISSLQPEDFATYYCQQFIDYFTFGPGTKVDIKR

SEQ ID NO: 1442 - protein, 447 aa, synthetic construct; identical to SEQ ID NO: 1210
  source 1..447: note = UGX322 heavy chain sequence

SEQ ID NO: 1443 - protein, 213 aa, synthetic construct; identical to SEQ ID NO: 1439
  source 1..213: note = UGX322 light chain sequence

SEQ ID NO: 1444 - protein, 117 aa, synthetic construct; identical to SEQ ID NO: 215
  source 1..117: note = UGX322 heavy chain variable region sequence

SEQ ID NO: 1445 - protein, 107 aa, synthetic construct; identical to SEQ ID NO: 1441
  source 1..107: note = UGX322 light chain variable region sequence

SEQ ID NO: 1446 - protein, 447 aa, synthetic construct; identical to SEQ ID NO: 1222
  source 1..447: note = UGX323 heavy chain sequence

SEQ ID NO: 1447 - protein, 213 aa, synthetic construct; identical to SEQ ID NO: 1439
  source 1..213: note = UGX323 light chain sequence

SEQ ID NO: 1448 - protein, 117 aa, synthetic construct; identical to SEQ ID NO: 222
  source 1..117: note = UGX323 heavy chain variable region sequence

SEQ ID NO: 1449 - protein, 107 aa, synthetic construct; identical to SEQ ID NO: 1441
  source 1..107: note = UGX323 light chain variable region sequence

SEQ ID NO: 1450 - protein, 447 aa, synthetic construct; identical to SEQ ID NO: 1206
  source 1..447: note = UGX324 heavy chain sequence

SEQ ID NO: 1451 - protein, 213 aa, synthetic construct
  source 1..213: note = UGX324 light chain sequence
AIQLTQSPSSLSASVGDRVTITCRASQGISSALVWYQQKPGKAPKLLIYDASSLESGVPSRFSGSGSGTDFTLTISSLQPEDFATYYCQQFTDYFTFGPGTKVDIKRTVAAPSVFIFPPSDEQLKSGTASVVCLLNNFYPREAKVQWKVDNALQSGNSQESVTEQDSKDSTYSLSSTLTLSKADYEKHKVYACEVTHQGLSSPVTKSFNRGEC

SEQ ID NO: 1452 - protein, 117 aa, synthetic construct; identical to SEQ ID NO: 214
  source 1..117: note = UGX324 heavy chain variable region sequence

SEQ ID NO: 1453 - protein, 107 aa, synthetic construct; identical to SEQ ID NO: 354
  source 1..107: note = UGX324 light chain variable region sequence

SEQ ID NO: 1454 - protein, 447 aa, synthetic construct; identical to SEQ ID NO: 1210
  source 1..447: note = UGX325 heavy chain sequence

SEQ ID NO: 1455 - protein, 213 aa, synthetic construct; identical to SEQ ID NO: 1451
  source 1..213: note = UGX325 light chain sequence

SEQ ID NO: 1456 - protein, 117 aa, synthetic construct; identical to SEQ ID NO: 215
  source 1..117: note = UGX325 heavy chain variable region sequence

SEQ ID NO: 1457 - protein, 107 aa, synthetic construct; identical to SEQ ID NO: 354
  source 1..107: note = UGX325 light chain variable region sequence

SEQ ID NO: 1458 - protein, 447 aa, synthetic construct; identical to SEQ ID NO: 1222
  source 1..447: note = UGX326 heavy chain sequence

SEQ ID NO: 1459 - protein, 213 aa, synthetic construct; identical to SEQ ID NO: 1451
  source 1..213: note = UGX326 light chain sequence

SEQ ID NO: 1460 - protein, 117 aa, synthetic construct; identical to SEQ ID NO: 222
  source 1..117: note = UGX326 heavy chain variable region sequence

SEQ ID NO: 1461 - protein, 107 aa, synthetic construct; identical to SEQ ID NO: 354
  source 1..107: note = UGX326 light chain variable region sequence

SEQ ID NO: 1462 - protein, 447 aa, synthetic construct
  source 1..447: note = UGX327 heavy chain sequence
QVQLVQSGAEVKKPGASVKVSCKASGYTFTNHYMHWVRQAPGQGLEWMGIINPASGSTSNAQKFQGRVTMTRDTSTSTVYMELSSLRSEDTAVYYCARDIVDAFDFWGQGTMVTVSSASTKGPSVFPLAPSSKSTSGGTAALGCLVKDYFPEPVTVSWNSGALTSGVHTFPAVLQSSGLYSLSSVVTVPSSSLGTQTYICNVNHKPSNTKVDKKVEPKSCDKTHTCPPCPAPELLGGPSVFLFPPKPKDTLMISRTPEVTCVVVDVSHEDPEVKFNWYVDGVEVHNAKTKPREEQYNSTYRVVSVLTVLHQDWLNGKEYKCKVSNKALPAPIEKTISKAKGQPREPQVYTLPPSRDELTKNQVSLTCLVKGFYPSDIAVEWESNGQPENNYKTTPPVLDSDGSFFLYSKLTVDKSRWQQGNVFSCSVMHEALHNHYTQKSLSLSPGK

SEQ ID NO: 1463 - protein, 213 aa, synthetic construct; identical to SEQ ID NO: 2
  source 1..213: note = UGX327 light chain sequence

SEQ ID NO: 1464 - protein, 117 aa, synthetic construct
  source 1..117: note = UGX327 heavy chain variable region sequence
QVQLVQSGAEVKKPGASVKVSCKASGYTFTNHYMHWVRQAPGQGLEWMGIINPASGSTSNAQKFQGRVTMTRDTSTSTVYMELSSLRSEDTAVYYCARDIVDAFDFWGQGTMVTVSS

SEQ ID NO: 1465 - protein, 107 aa, synthetic construct; identical to SEQ ID NO: 4
  source 1..107: note = UGX327 light chain variable region sequence

SEQ ID NO: 1466 - protein, 447 aa, synthetic construct
  source 1..447: note = UGX328 heavy chain sequence
QVQLVQSGAEVKKPGASVKVSCKASGYTFTNHYMHWVRQAPGQGLEWMGIINPLSGSTSNAQKFQGRVTMTRDTSTSTVYMELSSLRSEDTAVYYCARDIVDAFDFWGQGTMVTVSSASTKGPSVFPLAPSSKSTSGGTAALGCLVKDYFPEPVTVSWNSGALTSGVHTFPAVLQSSGLYSLSSVVTVPSSSLGTQTYICNVNHKPSNTKVDKKVEPKSCDKTHTCPPCPAPELLGGPSVFLFPPKPKDTLMISRTPEVTCVVVDVSHEDPEVKFNWYVDGVEVHNAKTKPREEQYNSTYRVVSVLTVLHQDWLNGKEYKCKVSNKALPAPIEKTISKAKGQPREPQVYTLPPSRDELTKNQVSLTCLVKGFYPSDIAVEWESNGQPENNYKTTPPVLDSDGSFFLYSKLTVDKSRWQQGNVFSCSVMHEALHNHYTQKSLSLSPGK

SEQ ID NO: 1467 - protein, 213 aa, synthetic construct; identical to SEQ ID NO: 2
  source 1..213: note = UGX328 light chain sequence

SEQ ID NO: 1468 - protein, 117 aa, synthetic construct; identical to SEQ ID NO: 252
  source 1..117: note = UGX328 heavy chain variable region sequence

SEQ ID NO: 1469 - protein, 107 aa, synthetic construct; identical to SEQ ID NO: 4
  source 1..107: note = UGX328 light chain variable region sequence

SEQ ID NO: 1470 - protein, 447 aa, synthetic construct
  source 1..447: note = UGX329 heavy chain sequence
QVQLVQSGAEVKKPGASVKVSCKASGYTFTNHYMHWVRQAPGQGLEWMGIINPVSGSTSNAQKFQGRVTMTRDTSTSTVYMELSSLRSEDTAVYYCARDIVDAFDFWGQGTMVTVSSASTKGPSVFPLAPSSKSTSGGTAALGCLVKDYFPEPVTVSWNSGALTSGVHTFPAVLQSSGLYSLSSVVTVPSSSLGTQTYICNVNHKPSNTKVDKKVEPKSCDKTHTCPPCPAPELLGGPSVFLFPPKPKDTLMISRTPEVTCVVVDVSHEDPEVKFNWYVDGVEVHNAKTKPREEQYNSTYRVVSVLTVLHQDWLNGKEYKCKVSNKALPAPIEKTISKAKGQPREPQVYTLPPSRDELTKNQVSLTCLVKGFYPSDIAVEWESNGQPENNYKTTPPVLDSDGSFFLYSKLTVDKSRWQQGNVFSCSVMHEALHNHYTQKSLSLSPGK

SEQ ID NO: 1471 - protein, 213 aa, synthetic construct; identical to SEQ ID NO: 2
  source 1..213: note = UGX329 light chain sequence

SEQ ID NO: 1472 - protein, 117 aa, synthetic construct; identical to SEQ ID NO: 256
  source 1..117: note = UGX329 heavy chain variable region sequence

SEQ ID NO: 1473 - protein, 107 aa, synthetic construct; identical to SEQ ID NO: 4
  source 1..107: note = UGX329 light chain variable region sequence

SEQ ID NO: 1474 - protein, 447 aa, synthetic construct
  source 1..447: note = UGX330 heavy chain sequence
QVQLVQSGAEVKKPGASVKVSCKASGYTFTNHYMHWVRQAPGQGLEWMGIINPRSGSTSNAQKFQGRVTMTRDTSTSTVYMELSSLRSEDTAVYYCARDIVDAFDFWGQGTMVTVSSASTKGPSVFPLAPSSKSTSGGTAALGCLVKDYFPEPVTVSWNSGALTSGVHTFPAVLQSSGLYSLSSVVTVPSSSLGTQTYICNVNHKPSNTKVDKKVEPKSCDKTHTCPPCPAPELLGGPSVFLFPPKPKDTLMISRTPEVTCVVVDVSHEDPEVKFNWYVDGVEVHNAKTKPREEQYNSTYRVVSVLTVLHQDWLNGKEYKCKVSNKALPAPIEKTISKAKGQPREPQVYTLPPSRDELTKNQVSLTCLVKGFYPSDIAVEWESNGQPENNYKTTPPVLDSDGSFFLYSKLTVDKSRWQQGNVFSCSVMHEALHNHYTQKSLSLSPGK

SEQ ID NO: 1475 - protein, 213 aa, synthetic construct; identical to SEQ ID NO: 2
  source 1..213: note = UGX330 light chain sequence

SEQ ID NO: 1476 - protein, 117 aa, synthetic construct
  source 1..117: note = UGX330 heavy chain variable region sequence
QVQLVQSGAEVKKPGASVKVSCKASGYTFTNHYMHWVRQAPGQGLEWMGIINPRSGSTSNAQKFQGRVTMTRDTSTSTVYMELSSLRSEDTAVYYCARDIVDAFDFWGQGTMVTVSS

SEQ ID NO: 1477 - protein, 107 aa, synthetic construct; identical to SEQ ID NO: 4
  source 1..107: note = UGX330 light chain variable region sequence

SEQ ID NO: 1478 - protein, 447 aa, synthetic construct
  source 1..447: note = UGX331 heavy chain sequence
QVQLVQSGAEVKKPGASVKVSCKASGYTFTNHYMHWVRQAPGQGLEWMGIINPDSGSTSNAQKFQGRVTMTRDTSTSTVYMELSSLRSEDTAVYYCARDIVDAFDFWGQGTMVTVSSASTKGPSVFPLAPSSKSTSGGTAALGCLVKDYFPEPVTVSWNSGALTSGVHTFPAVLQSSGLYSLSSVVTVPSSSLGTQTYICNVNHKPSNTKVDKKVEPKSCDKTHTCPPCPAPELLGGPSVFLFPPKPKDTLMISRTPEVTCVVVDVSHEDPEVKFNWYVDGVEVHNAKTKPREEQYNSTYRVVSVLTVLHQDWLNGKEYKCKVSNKALPAPIEKTISKAKGQPREPQVYTLPPSRDELTKNQVSLTCLVKGFYPSDIAVEWESNGQPENNYKTTPPVLDSDGSFFLYSKLTVDKSRWQQGNVFSCSVMHEALHNHYTQKSLSLSPGK

SEQ ID NO: 1479 - protein, 213 aa, synthetic construct; identical to SEQ ID NO: 2
  source 1..213: note = UGX331 light chain sequence

SEQ ID NO: 1480 - protein, 117 aa, synthetic construct
  source 1..117: note = UGX331 heavy chain variable region sequence
QVQLVQSGAEVKKPGASVKVSCKASGYTFTNHYMHWVRQAPGQGLEWMGIINPDSGSTSNAQKFQGRVTMTRDTSTSTVYMELSSLRSEDTAVYYCARDIVDAFDFWGQGTMVTVSS

SEQ ID NO: 1481 - protein, 107 aa, synthetic construct; identical to SEQ ID NO: 4
  source 1..107: note = UGX331 light chain variable region sequence

SEQ ID NO: 1482 - protein, 447 aa, synthetic construct
  source 1..447: note = UGX332 heavy chain sequence
QVQLVQSGAEVKKPGASVKVSCKASGYTFTNHYMHWVRQAPGQGLEWMGIINPGSGSTSNAQKFQGRVTMTRDTSTSTVYMELSSLRSEDTAVYYCARDIVDAFDFWGQGTMVTVSSASTKGPSVFPLAPSSKSTSGGTAALGCLVKDYFPEPVTVSWNSGALTSGVHTFPAVLQSSGLYSLSSVVTVPSSSLGTQTYICNVNHKPSNTKVDKKVEPKSCDKTHTCPPCPAPELLGGPSVFLFPPKPKDTLMISRTPEVTCVVVDVSHEDPEVKFNWYVDGVEVHNAKTKPREEQYNSTYRVVSVLTVLHQDWLNGKEYKCKVSNKALPAPIEKTISKAKGQPREPQVYTLPPSRDELTKNQVSLTCLVKGFYPSDIAVEWESNGQPENNYKTTPPVLDSDGSFFLYSKLTVDKSRWQQGNVFSCSVMHEALHNHYTQKSLSLSPGK

SEQ ID NO: 1483 - protein, 213 aa, synthetic construct; identical to SEQ ID NO: 2
  source 1..213: note = UGX332 light chain sequence

SEQ ID NO: 1484 - protein, 117 aa, synthetic construct
  source 1..117: note = UGX332 heavy chain variable region sequence
QVQLVQSGAEVKKPGASVKVSCKASGYTFTNHYMHWVRQAPGQGLEWMGIINPGSGSTSNAQKFQGRVTMTRDTSTSTVYMELSSLRSEDTAVYYCARDIVDAFDFWGQGTMVTVSS

SEQ ID NO: 1485 - protein, 107 aa, synthetic construct; identical to SEQ ID NO: 4
  source 1..107: note = UGX332 light chain variable region sequence

SEQ ID NO: 1486 - protein, 447 aa, synthetic construct
  source 1..447: note = UGX333 heavy chain sequence
QVQLVQSGAEVKKPGASVKVSCKASGYTFTNHYMHWVRQAPGQGLEWMGIINPHSGSTSNAQKFQGRVTMTRDTSTSTVYMELSSLRSEDTAVYYCARDIVDAFDFWGQGTMVTVSSASTKGPSVFPLAPSSKSTSGGTAALGCLVKDYFPEPVTVSWNSGALTSGVHTFPAVLQSSGLYSLSSVVTVPSSSLGTQTYICNVNHKPSNTKVDKKVEPKSCDKTHTCPPCPAPELLGGPSVFLFPPKPKDTLMISRTPEVTCVVVDVSHEDPEVKFNWYVDGVEVHNAKTKPREEQYNSTYRVVSVLTVLHQDWLNGKEYKCKVSNKALPAPIEKTISKAKGQPREPQVYTLPPSRDELTKNQVSLTCLVKGFYPSDIAVEWESNGQPENNYKTTPPVLDSDGSFFLYSKLTVDKSRWQQGNVFSCSVMHEALHNHYTQKSLSLSPGK

SEQ ID NO: 1487 - protein, 213 aa, synthetic construct; identical to SEQ ID NO: 2
  source 1..213: note = UGX333 light chain sequence

SEQ ID NO: 1488 - protein, 117 aa, synthetic construct
  source 1..117: note = UGX333 heavy chain variable region sequence
QVQLVQSGAEVKKPGASVKVSCKASGYTFTNHYMHWVRQAPGQGLEWMGIINPHSGSTSNAQKFQGRVTMTRDTSTSTVYMELSSLRSEDTAVYYCARDIVDAFDFWGQGTMVTVSS

SEQ ID NO: 1489 - protein, 107 aa, synthetic construct; identical to SEQ ID NO: 4
  source 1..107: note = UGX333 light chain variable region sequence

SEQ ID NO: 1490 - protein, 447 aa, synthetic construct
  source 1..447: note = UGX334 heavy chain sequence
QVQLVQSGAEVKKPGASVKVSCKASGYTFTNHYMHWVRQAPGQGLEWMGIINPKSGSTSNAQKFQGRVTMTRDTSTSTVYMELSSLRSEDTAVYYCARDIVDAFDFWGQGTMVTVSSASTKGPSVFPLAPSSKSTSGGTAALGCLVKDYFPEPVTVSWNSGALTSGVHTFPAVLQSSGLYSLSSVVTVPSSSLGTQTYICNVNHKPSNTKVDKKVEPKSCDKTHTCPPCPAPELLGGPSVFLFPPKPKDTLMISRTPEVTCVVVDVSHEDPEVKFNWYVDGVEVHNAKTKPREEQYNSTYRVVSVLTVLHQDWLNGKEYKCKVSNKALPAPIEKTISKAKGQPREPQVYTLPPSRDELTKNQVSLTCLVKGFYPSDIAVEWESNGQPENNYKTTPPVLDSDGSFFLYSKLTVDKSRWQQGNVFSCSVMHEALHNHYTQKSLSLSPGK

SEQ ID NO: 1491 - protein, 213 aa, synthetic construct; identical to SEQ ID NO: 2
  source 1..213: note = UGX334 light chain sequence

SEQ ID NO: 1492 - protein, 117 aa, synthetic construct
  source 1..117: note = UGX334 heavy chain variable region sequence
QVQLVQSGAEVKKPGASVKVSCKASGYTFTNHYMHWVRQAPGQGLEWMGIINPKSGSTSNAQKFQGRVTMTRDTSTSTVYMELSSLRSEDTAVYYCARDIVDAFDFWGQGTMVTVSS

SEQ ID NO: 1493 - protein, 107 aa, synthetic construct; identical to SEQ ID NO: 4
  source 1..107: note = UGX334 light chain variable region sequence

SEQ ID NO: 1494 - protein, 447 aa, synthetic construct
  source 1..447: note = UGX335 heavy chain sequence
QVQLVQSGAEVKKPGASVKVSCKASGYTFTNHYMHWVRQAPGQGLEWMGIINPMSGSTSNAQKFQGRVTMTRDTSTSTVYMELSSLRSEDTAVYYCARDIVDAFDFWGQGTMVTVSSASTKGPSVFPLAPSSKSTSGGTAALGCLVKDYFPEPVTVSWNSGALTSGVHTFPAVLQSSGLYSLSSVVTVPSSSLGTQTYICNVNHKPSNTKVDKKVEPKSCDKTHTCPPCPAPELLGGPSVFLFPPKPKDTLMISRTPEVTCVVVDVSHEDPEVKFNWYVDGVEVHNAKTKPREEQYNSTYRVVSVLTVLHQDWLNGKEYKCKVSNKALPAPIEKTISKAKGQPREPQVYTLPPSRDELTKNQVSLTCLVKGFYPSDIAVEWESNGQPENNYKTTPPVLDSDGSFFLYSKLTVDKSRWQQGNVFSCSVMHEALHNHYTQKSLSLSPGK

SEQ ID NO: 1495 - protein, 213 aa, synthetic construct; identical to SEQ ID NO: 2
  source 1..213: note = UGX335 light chain sequence

SEQ ID NO: 1496 - protein, 117 aa, synthetic construct
  source 1..117: note = UGX335 heavy chain variable region sequence
QVQLVQSGAEVKKPGASVKVSCKASGYTFTNHYMHWVRQAPGQGLEWMGIINPMSGSTSNAQKFQGRVTMTRDTSTSTVYMELSSLRSEDTAVYYCARDIVDAFDFWGQGTMVTVSS

SEQ ID NO: 1497 - protein, 107 aa, synthetic construct; identical to SEQ ID NO: 4
  source 1..107: note = UGX335 light chain variable region sequence

SEQ ID NO: 1498 - protein, 447 aa, synthetic construct
  source 1..447: note = UGX336 heavy chain sequence
QVQLVQSGAEVKKPGASVKVSCKASGYTFTNHYMHWVRQAPGQGLEWMGIINPNSGSTSNAQKFQGRVTMTRDTSTSTVYMELSSLRSEDTAVYYCARDIVDAFDFWGQGTMVTVSSASTKGPSVFPLAPSSKSTSGGTAALGCLVKDYFPEPVTVSWNSGALTSGVHTFPAVLQSSGLYSLSSVVTVPSSSLGTQTYICNVNHKPSNTKVDKKVEPKSCDKTHTCPPCPAPELLGGPSVFLFPPKPKDTLMISRTPEVTCVVVDVSHEDPEVKFNWYVDGVEVHNAKTKPREEQYNSTYRVVSVLTVLHQDWLNGKEYKCKVSNKALPAPIEKTISKAKGQPREPQVYTLPPSRDELTKNQVSLTCLVKGFYPSDIAVEWESNGQPENNYKTTPPVLDSDGSFFLYSKLTVDKSRWQQGNVFSCSVMHEALHNHYTQKSLSLSPGK

SEQ ID NO: 1499 - protein, 213 aa, synthetic construct; identical to SEQ ID NO: 2
  source 1..213: note = UGX336 light chain sequence

SEQ ID NO: 1500 - protein, 117 aa, synthetic construct
  source 1..117: note = UGX336 heavy chain variable region sequence
QVQLVQSGAEVKKPGASVKVSCKASGYTFTNHYMHWVRQAPGQGLEWMGIINPNSGSTSNAQKFQGRVTMTRDTSTSTVYMELSSLRSEDTAVYYCARDIVDAFDFWGQGTMVTVSS

SEQ ID NO: 1501 - protein, 107 aa, synthetic construct; identical to SEQ ID NO: 4
  source 1..107: note = UGX336 light chain variable region sequence

SEQ ID NO: 1502 - protein, 447 aa, synthetic construct
  source 1..447: note = UGX337 heavy chain sequence
QVQLVQSGAEVKKPGASVKVSCKASGYTFTNHYMHWVRQAPGQGLEWMGIINPPSGSTSNAQKFQGRVTMTRDTSTSTVYMELSSLRSEDTAVYYCARDIVDAFDFWGQGTMVTVSSASTKGPSVFPLAPSSKSTSGGTAALGCLVKDYFPEPVTVSWNSGALTSGVHTFPAVLQSSGLYSLSSVVTVPSSSLGTQTYICNVNHKPSNTKVDKKVEPKSCDKTHTCPPCPAPELLGGPSVFLFPPKPKDTLMISRTPEVTCVVVDVSHEDPEVKFNWYVDGVEVHNAKTKPREEQYNSTYRVVSVLTVLHQDWLNGKEYKCKVSNKALPAPIEKTISKAKGQPREPQVYTLPPSRDELTKNQVSLTCLVKGFYPSDIAVEWESNGQPENNYKTTPPVLDSDGSFFLYSKLTVDKSRWQQGNVFSCSVMHEALHNHYTQKSLSLSPGK

SEQ ID NO: 1503 - protein, 213 aa, synthetic construct; identical to SEQ ID NO: 2
  source 1..213: note = UGX337 light chain sequence

SEQ ID NO: 1504 - protein, 117 aa, synthetic construct
  source 1..117: note = UGX337 heavy chain variable region sequence
QVQLVQSGAEVKKPGASVKVSCKASGYTFTNHYMHWVRQAPGQGLEWMGIINPPSGSTSNAQKFQGRVTMTRDTSTSTVYMELSSLRSEDTAVYYCARDIVDAFDFWGQGTMVTVSS

SEQ ID NO: 1505 - protein, 107 aa, synthetic construct; identical to SEQ ID NO: 4
  source 1..107: note = UGX337 light chain variable region sequence

SEQ ID NO: 1506 - protein, 447 aa, synthetic construct
  source 1..447: note = UGX338 heavy chain sequence
QVQLVQSGAEVKKPGASVKVSCKASGYTFTNHYMHWVRQAPGQGLEWMGIINPWSGSTSNAQKFQGRVTMTRDTSTSTVYMELSSLRSEDTAVYYCARDIVDAFDFWGQGTMVTVSSASTKGPSVFPLAPSSKSTSGGTAALGCLVKDYFPEPVTVSWNSGALTSGVHTFPAVLQSSGLYSLSSVVTVPSSSLGTQTYICNVNHKPSNTKVDKKVEPKSCDKTHTCPPCPAPELLGGPSVFLFPPKPKDTLMISRTPEVTCVVVDVSHEDPEVKFNWYVDGVEVHNAKTKPREEQYNSTYRVVSVLTVLHQDWLNGKEYKCKVSNKALPAPIEKTISKAKGQPREPQVYTLPPSRDELTKNQVSLTCLVKGFYPSDIAVEWESNGQPENNYKTTPPVLDSDGSFFLYSKLTVDKSRWQQGNVFSCSVMHEALHNHYTQKSLSLSPGK

SEQ ID NO: 1507 - protein, 213 aa, synthetic construct; identical to SEQ ID NO: 2
  source 1..213: note = UGX338 light chain sequence

SEQ ID NO: 1508 - protein, 117 aa, synthetic construct
  source 1..117: note = UGX338 heavy chain variable region sequence
QVQLVQSGAEVKKPGASVKVSCKASGYTFTNHYMHWVRQAPGQGLEWMGIINPWSGSTSNAQKFQGRVTMTRDTSTSTVYMELSSLRSEDTAVYYCARDIVDAFDFWGQGTMVTVSS

SEQ ID NO: 1509 - protein, 107 aa, synthetic construct; identical to SEQ ID NO: 4
  source 1..107: note = UGX338 light chain variable region sequence

SEQ ID NO: 1510 - protein, 447 aa, synthetic construct
  source 1..447: note = UGX339 heavy chain sequence
QVQLVQSGAEVKKPGASVKVSCKASGYTFTNHYMHWVRQAPGQGLEWMGIINPISGSTANAQKFQGRVTMTRDTSTSTVYMELSSLRSEDTAVYYCARDIVDAFDFWGQGTMVTVSSASTKGPSVFPLAPSSKSTSGGTAALGCLVKDYFPEPVTVSWNSGALTSGVHTFPAVLQSSGLYSLSSVVTVPSSSLGTQTYICNVNHKPSNTKVDKKVEPKSCDKTHTCPPCPAPELLGGPSVFLFPPKPKDTLMISRTPEVTCVVVDVSHEDPEVKFNWYVDGVEVHNAKTKPREEQYNSTYRVVSVLTVLHQDWLNGKEYKCKVSNKALPAPIEKTISKAKGQPREPQVYTLPPSRDELTKNQVSLTCLVKGFYPSDIAVEWESNGQPENNYKTTPPVLDSDGSFFLYSKLTVDKSRWQQGNVFSCSVMHEALHNHYTQKSLSLSPGK

SEQ ID NO: 1511 - protein, 213 aa, synthetic construct; identical to SEQ ID NO: 2
  source 1..213: note = UGX339 light chain sequence

SEQ ID NO: 1512 - protein, 117 aa, synthetic construct
  source 1..117: note = UGX339 heavy chain variable region sequence
QVQLVQSGAEVKKPGASVKVSCKASGYTFTNHYMHWVRQAPGQGLEWMGIINPISGSTANAQKFQGRVTMTRDTSTSTVYMELSSLRSEDTAVYYCARDIVDAFDFWGQGTMVTVSS

SEQ ID NO: 1513 - protein, 107 aa, synthetic construct; identical to SEQ ID NO: 4
  source 1..107: note = UGX339 light chain variable region sequence

SEQ ID NO: 1514 - protein, 447 aa, synthetic construct
  source 1..447: note = UGX341 heavy chain sequence
QVQLVQSGAEVKKPGASVKVSCKASGYTFTNHYMHWVRQAPGQGLEWMGIINPISGSTNNAQKFQGRVTMTRDTSTSTVYMELSSLRSEDTAVYYCARDIVDAFDFWGQGTMVTVSSASTKGPSVFPLAPSSKSTSGGTAALGCLVKDYFPEPVTVSWNSGALTSGVHTFPAVLQSSGLYSLSSVVTVPSSSLGTQTYICNVNHKPSNTKVDKKVEPKSCDKTHTCPPCPAPELLGGPSVFLFPPKPKDTLMISRTPEVTCVVVDVSHEDPEVKFNWYVDGVEVHNAKTKPREEQYNSTYRVVSVLTVLHQDWLNGKEYKCKVSNKALPAPIEKTISKAKGQPREPQVYTLPPSRDELTKNQVSLTCLVKGFYPSDIAVEWESNGQPENNYKTTPPVLDSDGSFFLYSKLTVDKSRWQQGNVFSCSVMHEALHNHYTQKSLSLSPGK

SEQ ID NO: 1515 - protein, 213 aa, synthetic construct; identical to SEQ ID NO: 2
  source 1..213: note = UGX341 light chain sequence

SEQ ID NO: 1516 - protein, 117 aa, synthetic construct
  source 1..117: note = UGX341 heavy chain variable region sequence
QVQLVQSGAEVKKPGASVKVSCKASGYTFTNHYMHWVRQAPGQGLEWMGIINPISGSTNNAQKFQGRVTMTRDTSTSTVYMELSSLRSEDTAVYYCARDIVDAFDFWGQGTMVTVSS

SEQ ID NO: 1517 - protein, 107 aa, synthetic construct; identical to SEQ ID NO: 4
  source 1..107: note = UGX341 light chain variable region sequence

SEQ ID NO: 1518 - protein, 447 aa, synthetic construct
  source 1..447: note = UGX342 heavy chain sequence
QVQLVQSGAEVKKPGASVKVSCKASGYTFTNHYMHWVRQAPGQGLEWMGIINPISGSTGNAQKFQGRVTMTRDTSTSTVYMELSSLRSEDTAVYYCARDIVDAFDFWGQGTMVTVSSASTKGPSVFPLAPSSKSTSGGTAALGCLVKDYFPEPVTVSWNSGALTSGVHTFPAVLQSSGLYSLSSVVTVPSSSLGTQTYICNVNHKPSNTKVDKKVEPKSCDKTHTCPPCPAPELLGGPSVFLFPPKPKDTLMISRTPEVTCVVVDVSHEDPEVKFNWYVDGVEVHNAKTKPREEQYNSTYRVVSVLTVLHQDWLNGKEYKCKVSNKALPAPIEKTISKAKGQPREPQVYTLPPSRDELTKNQVSLTCLVKGFYPSDIAVEWESNGQPENNYKTTPPVLDSDGSFFLYSKLTVDKSRWQQGNVFSCSVMHEALHNHYTQKSLSLSPGK

SEQ ID NO: 1519 - protein, 213 aa, synthetic construct; identical to SEQ ID NO: 2
  source 1..213: note = UGX342 light chain sequence

SEQ ID NO: 1520 - protein, 117 aa, synthetic construct
  source 1..117: note = UGX342 heavy chain variable region sequence
QVQLVQSGAEVKKPGASVKVSCKASGYTFTNHYMHWVRQAPGQGLEWMGIINPISGSTGNAQKFQGRVTMTRDTSTSTVYMELSSLRSEDTAVYYCARDIVDAFDFWGQGTMVTVSS

SEQ ID NO: 1521 - protein, 107 aa, synthetic construct; identical to SEQ ID NO: 4
  source 1..107: note = UGX342 light chain variable region sequence

SEQ ID NO: 1522 - protein, 447 aa, synthetic construct
  source 1..447: note = UGX343 heavy chain sequence
QVQLVQSGAEVKKPGASVKVSCKASGYTFTNHYMHWVRQAPGQGLEWMGIINPISGSTHNAQKFQGRVTMTRDTSTSTVYMELSSLRSEDTAVYYCARDIVDAFDFWGQGTMVTVSSASTKGPSVFPLAPSSKSTSGGTAALGCLVKDYFPEPVTVSWNSGALTSGVHTFPAVLQSSGLYSLSSVVTVPSSSLGTQTYICNVNHKPSNTKVDKKVEPKSCDKTHTCPPCPAPELLGGPSVFLFPPKPKDTLMISRTPEVTCVVVDVSHEDPEVKFNWYVDGVEVHNAKTKPREEQYNSTYRVVSVLTVLHQDWLNGKEYKCKVSNKALPAPIEKTISKAKGQPREPQVYTLPPSRDELTKNQVSLTCLVKGFYPSDIAVEWESNGQPENNYKTTPPVLDSDGSFFLYSKLTVDKSRWQQGNVFSCSVMHEALHNHYTQKSLSLSPGK

SEQ ID NO: 1523 - protein, 213 aa, synthetic construct; identical to SEQ ID NO: 2
  source 1..213: note = UGX343 light chain sequence

SEQ ID NO: 1524 - protein, 117 aa, synthetic construct
  source 1..117: note = UGX343 heavy chain variable region sequence
QVQLVQSGAEVKKPGASVKVSCKASGYTFTNHYMHWVRQAPGQGLEWMGIINPISGSTHNAQKFQGRVTMTRDTSTSTVYMELSSLRSEDTAVYYCARDIVDAFDFWGQGTMVTVSS

SEQ ID NO: 1525 - protein, 107 aa, synthetic construct; identical to SEQ ID NO: 4
  source 1..107: note = UGX343 light chain variable region sequence

SEQ ID NO: 1526 - protein, 447 aa, synthetic construct
  source 1..447: note = UGX344 heavy chain sequence
QVQLVQSGAEVKKPGASVKVSCKASGYTFTNHYMHWVRQAPGQGLEWMGIINPISGSTKNAQKFQGRVTMTRDTSTSTVYMELSSLRSEDTAVYYCARDIVDAFDFWGQGTMVTVSSASTKGPSVFPLAPSSKSTSGGTAALGCLVKDYFPEPVTVSWNSGALTSGVHTFPAVLQSSGLYSLSSVVTVPSSSLGTQTYICNVNHKPSNTKVDKKVEPKSCDKTHTCPPCPAPELLGGPSVFLFPPKPKDTLMISRTPEVTCVVVDVSHEDPEVKFNWYVDGVEVHNAKTKPREEQYNSTYRVVSVLTVLHQDWLNGKEYKCKVSNKALPAPIEKTISKAKGQPREPQVYTLPPSRDELTKNQVSLTCLVKGFYPSDIAVEWESNGQPENNYKTTPPVLDSDGSFFLYSKLTVDKSRWQQGNVFSCSVMHEALHNHYTQKSLSLSPGK

SEQ ID NO: 1527 - protein, 213 aa, synthetic construct; identical to SEQ ID NO: 2
  source 1..213: note = UGX344 light chain sequence

SEQ ID NO: 1528 - protein, 117 aa, synthetic construct
  source 1..117: note = UGX344 heavy chain variable region sequence
QVQLVQSGAEVKKPGASVKVSCKASGYTFTNHYMHWVRQAPGQGLEWMGIINPISGSTKNAQKFQGRVTMTRDTSTSTVYMELSSLRSEDTAVYYCARDIVDAFDFWGQGTMVTVSS

SEQ ID NO: 1529 - protein, 107 aa, synthetic construct; identical to SEQ ID NO: 4
  source 1..107: note = UGX344 light chain variable region sequence

SEQ ID NO: 1530 - protein, 447 aa, synthetic construct
  source 1..447: note = UGX345 heavy chain sequence
QVQLVQSGAEVKKPGASVKVSCKASGYTFTNHYMHWVRQAPGQGLEWMGIINPISGSTMNAQKFQGRVTMTRDTSTSTVYMELSSLRSEDTAVYYCARDIVDAFDFWGQGTMVTVSSASTKGPSVFPLAPSSKSTSGGTAALGCLVKDYFPEPVTVSWNSGALTSGVHTFPAVLQSSGLYSLSSVVTVPSSSLGTQTYICNVNHKPSNTKVDKKVEPKSCDKTHTCPPCPAPELLGGPSVFLFPPKPKDTLMISRTPEVTCVVVDVSHEDPEVKFNWYVDGVEVHNAKTKPREEQYNSTYRVVSVLTVLHQDWLNGKEYKCKVSNKALPAPIEKTISKAKGQPREPQVYTLPPSRDELTKNQVSLTCLVKGFYPSDIAVEWESNGQPENNYKTTPPVLDSDGSFFLYSKLTVDKSRWQQGNVFSCSVMHEALHNHYTQKSLSLSPGK

SEQ ID NO: 1531 - protein, 213 aa, synthetic construct; identical to SEQ ID NO: 2
  source 1..213: note = UGX345 light chain sequence

SEQ ID NO: 1532 - protein, 117 aa, synthetic construct
  source 1..117: note = UGX345 heavy chain variable region sequence
QVQLVQSGAEVKKPGASVKVSCKASGYTFTNHYMHWVRQAPGQGLEWMGIINPISGSTMNAQKFQGRVTMTRDTSTSTVYMELSSLRSEDTAVYYCARDIVDAFDFWGQGTMVTVSS

SEQ ID NO: 1533 - protein, 107 aa, synthetic construct; identical to SEQ ID NO: 4
  source 1..107: note = UGX345 light chain variable region sequence

SEQ ID NO: 1534 - protein, 447 aa, synthetic construct
  source 1..447: note = UGX346 heavy chain sequence
QVQLVQSGAEVKKPGASVKVSCKASGYTFTNHYMHWVRQAPGQGLEWMGIINPISGSTPNAQKFQGRVTMTRDTSTSTVYMELSSLRSEDTAVYYCARDIVDAFDFWGQGTMVTVSSASTKGPSVFPLAPSSKSTSGGTAALGCLVKDYFPEPVTVSWNSGALTSGVHTFPAVLQSSGLYSLSSVVTVPSSSLGTQTYICNVNHKPSNTKVDKKVEPKSCDKTHTCPPCPAPELLGGPSVFLFPPKPKDTLMISRTPEVTCVVVDVSHEDPEVKFNWYVDGVEVHNAKTKPREEQYNSTYRVVSVLTVLHQDWLNGKEYKCKVSNKALPAPIEKTISKAKGQPREPQVYTLPPSRDELTKNQVSLTCLVKGFYPSDIAVEWESNGQPENNYKTTPPVLDSDGSFFLYSKLTVDKSRWQQGNVFSCSVMHEALHNHYTQKSLSLSPGK

SEQ ID NO: 1535 - protein, 213 aa, synthetic construct; identical to SEQ ID NO: 2
  source 1..213: note = UGX346 light chain sequence

SEQ ID NO: 1536 - protein, 117 aa, synthetic construct
  source 1..117: note = UGX346 heavy chain variable region sequence
QVQLVQSGAEVKKPGASVKVSCKASGYTFTNHYMHWVRQAPGQGLEWMGIINPISGSTPNAQKFQGRVTMTRDTSTSTVYMELSSLRSEDTAVYYCARDIVDAFDFWGQGTMVTVSS

SEQ ID NO: 1537 - protein, 107 aa, synthetic construct; identical to SEQ ID NO: 4
  source 1..107: note = UGX346 light chain variable region sequence

SEQ ID NO: 1538 - protein, 447 aa, synthetic construct
  source 1..447: note = UGX347 heavy chain sequence
QVQLVQSGAEVKKPGASVKVSCKASGYTFTNHYMHWVRQAPGQGLEWMGIINPISGSTWNAQKFQGRVTMTRDTSTSTVYMELSSLRSEDTAVYYCARDIVDAFDFWGQGTMVTVSSASTKGPSVFPLAPSSKSTSGGTAALGCLVKDYFPEPVTVSWNSGALTSGVHTFPAVLQSSGLYSLSSVVTVPSSSLGTQTYICNVNHKPSNTKVDKKVEPKSCDKTHTCPPCPAPELLGGPSVFLFPPKPKDTLMISRTPEVTCVVVDVSHEDPEVKFNWYVDGVEVHNAKTKPREEQYNSTYRVVSVLTVLHQDWLNGKEYKCKVSNKALPAPIEKTISKAKGQPREPQVYTLPPSRDELTKNQVSLTCLVKGFYPSDIAVEWESNGQPENNYKTTPPVLDSDGSFFLYSKLTVDKSRWQQGNVFSCSVMHEALHNHYTQKSLSLSPGK

SEQ ID NO: 1539 - protein, 213 aa, synthetic construct; identical to SEQ ID NO: 2
  source 1..213: note = UGX347 light chain sequence

SEQ ID NO: 1540 - protein, 117 aa, synthetic construct
  source 1..117: note = UGX347 heavy chain variable region sequence
QVQLVQSGAEVKKPGASVKVSCKASGYTFTNHYMHWVRQAPGQGLEWMGIINPISGSTWNAQKFQGRVTMTRDTSTSTVYMELSSLRSEDTAVYYCARDIVDAFDFWGQGTMVTVSS

SEQ ID NO: 1541 - protein, 107 aa, synthetic construct; identical to SEQ ID NO: 4
  source 1..107: note = UGX347 light chain variable region sequence

SEQ ID NO: 1542 - protein, 447 aa, synthetic construct; identical to SEQ ID NO: 1
  source 1..447: note = UGX348 heavy chain sequence

SEQ ID NO: 1543 - protein, 213 aa, synthetic construct
  source 1..213: note = UGX348 light chain sequence
AIQLTQSPSSLSASVGDRVTITCRASQGISSALVWYQQKPGKAPKLLIYDASSLESGVPSRFSGSGSGTDFTLTISSLQPEDFATYYCQQFNDAFTFGPGTKVDIKRTVAAPSVFIFPPSDEQLKSGTASVVCLLNNFYPREAKVQWKVDNALQSGNSQESVTEQDSKDSTYSLSSTLTLSKADYEKHKVYACEVTHQGLSSPVTKSFNRGEC

SEQ ID NO: 1544 - protein, 117 aa, synthetic construct; identical to SEQ ID NO: 3
  source 1..117: note = UGX348 heavy chain variable region sequence

SEQ ID NO: 1545 - protein, 107 aa, synthetic construct
  source 1..107: note = UGX348 light chain variable region sequence
AIQLTQSPSSLSASVGDRVTITCRASQGISSALVWYQQKPGKAPKLLIYDASSLESGVPSRFSGSGSGTDFTLTISSLQPEDFATYYCQQFNDAFTFGPGTKVDIKR

SEQ ID NO: 1546 - protein, 447 aa, synthetic construct; identical to SEQ ID NO: 1
  source 1..447: note = UGX349 heavy chain sequence

SEQ ID NO: 1547 - protein, 213 aa, synthetic construct
  source 1..213: note = UGX349 light chain sequence
AIQLTQSPSSLSASVGDRVTITCRASQGISSALVWYQQKPGKAPKLLIYDASSLESGVPSRFSGSGSGTDFTLTISSLQPEDFATYYCQQFNDNFTFGPGTKVDIKRTVAAPSVFIFPPSDEQLKSGTASVVCLLNNFYPREAKVQWKVDNALQSGNSQESVTEQDSKDSTYSLSSTLTLSKADYEKHKVYACEVTHQGLSSPVTKSFNRGEC

SEQ ID NO: 1548 - protein, 117 aa, synthetic construct; identical to SEQ ID NO: 3
  source 1..117: note = UGX349 heavy chain variable region sequence

SEQ ID NO: 1549 - protein, 107 aa, synthetic construct
  source 1..107: note = UGX349 light chain variable region sequence
AIQLTQSPSSLSASVGDRVTITCRASQGISSALVWYQQKPGKAPKLLIYDASSLESGVPSRFSGSGSGTDFTLTISSLQPEDFATYYCQQFNDNFTFGPGTKVDIKR

SEQ ID NO: 1550 - protein, 447 aa, synthetic construct; identical to SEQ ID NO: 1
  source 1..447: note = UGX350 heavy chain sequence

SEQ ID NO: 1551 - protein, 213 aa, synthetic construct
  source 1..213: note = UGX350 light chain sequence
AIQLTQSPSSLSASVGDRVTITCRASQGISSALVWYQQKPGKAPKLLIYDASSLESGVPSRFSGSGSGTDFTLTISSLQPEDFATYYCQQFNDGFTFGPGTKVDIKRTVAAPSVFIFPPSDEQLKSGTASVVCLLNNFYPREAKVQWKVDNALQSGNSQESVTEQDSKDSTYSLSSTLTLSKADYEKHKVYACEVTHQGLSSPVTKSFNRGEC

SEQ ID NO: 1552 - protein, 117 aa, synthetic construct; identical to SEQ ID NO: 3
  source 1..117: note = UGX350 heavy chain variable region sequence

SEQ ID NO: 1553 - protein, 107 aa, synthetic construct
  source 1..107: note = UGX350 light chain variable region sequence
AIQLTQSPSSLSASVGDRVTITCRASQGISSALVWYQQKPGKAPKLLIYDASSLESGVPSRFSGSGSGTDFTLTISSLQPEDFATYYCQQFNDGFTFGPGTKVDIKR

SEQ ID NO: 1554 - protein, 447 aa, synthetic construct; identical to SEQ ID NO: 1
  source 1..447: note = UGX351 heavy chain sequence

SEQ ID NO: 1555 - protein, 213 aa, synthetic construct
  source 1..213: note = UGX351 light chain sequence
AIQLTQSPSSLSASVGDRVTITCRASQGISSALVWYQQKPGKAPKLLIYDASSLESGVPSRFSGSGSGTDFTLTISSLQPEDFATYYCQQFNDHFTFGPGTKVDIKRTVAAPSVFIFPPSDEQLKSGTASVVCLLNNFYPREAKVQWKVDNALQSGNSQESVTEQDSKDSTYSLSSTLTLSKADYEKHKVYACEVTHQGLSSPVTKSFNRGEC

SEQ ID NO: 1556 - protein, 117 aa, synthetic construct; identical to SEQ ID NO: 3
  source 1..117: note = UGX351 heavy chain variable region sequence

SEQ ID NO: 1557 - protein, 107 aa, synthetic construct
  source 1..107: note = UGX351 light chain variable region sequence
AIQLTQSPSSLSASVGDRVTITCRASQGISSALVWYQQKPGKAPKLLIYDASSLESGVPSRFSGSGSGTDFTLTISSLQPEDFATYYCQQFNDHFTFGPGTKVDIKR

SEQ ID NO: 1558 - protein, 447 aa, synthetic construct; identical to SEQ ID NO: 1
  source 1..447: note = UGX352 heavy chain sequence

SEQ ID NO: 1559 - protein, 213 aa, synthetic construct
  source 1..213: note = UGX352 light chain sequence
AIQLTQSPSSLSASVGDRVTITCRASQGISSALVWYQQKPGKAPKLLIYDASSLESGVPSRFSGSGSGTDFTLTISSLQPEDFATYYCQQFNDIFTFGPGTKVDIKRTVAAPSVFIFPPSDEQLKSGTASVVCLLNNFYPREAKVQWKVDNALQSGNSQESVTEQDSKDSTYSLSSTLTLSKADYEKHKVYACEVTHQGLSSPVTKSFNRGEC

SEQ ID NO: 1560 - protein, 117 aa, synthetic construct; identical to SEQ ID NO: 3
  source 1..117: note = UGX352 heavy chain variable region sequence

SEQ ID NO: 1561 - protein, 107 aa, synthetic construct
  source 1..107: note = UGX352 light chain variable region sequence
AIQLTQSPSSLSASVGDRVTITCRASQGISSALVWYQQKPGKAPKLLIYDASSLESGVPSRFSGSGSGTDFTLTISSLQPEDFATYYCQQFNDIFTFGPGTKVDIKR

SEQ ID NO: 1562 - protein, 447 aa, synthetic construct; identical to SEQ ID NO: 1
  source 1..447: note = UGX353 heavy chain sequence

SEQ ID NO: 1563 - protein, 213 aa, synthetic construct
  source 1..213: note = UGX353 light chain sequence
AIQLTQSPSSLSASVGDRVTITCRASQGISSALVWYQQKPGKAPKLLIYDASSLESGVPSRFSGSGSGTDFTLTISSLQPEDFATYYCQQFNDLFTFGPGTKVDIKRTVAAPSVFIFPPSDEQLKSGTASVVCLLNNFYPREAKVQWKVDNALQSGNSQESVTEQDSKDSTYSLSSTLTLSKADYEKHKVYACEVTHQGLSSPVTKSFNRGEC

SEQ ID NO: 1564 - protein, 117 aa, synthetic construct; identical to SEQ ID NO: 3
  source 1..117: note = UGX353 heavy chain variable region sequence

SEQ ID NO: 1565 - protein, 107 aa, synthetic construct
  source 1..107: note = UGX353 light chain variable region sequence
AIQLTQSPSSLSASVGDRVTITCRASQGISSALVWYQQKPGKAPKLLIYDASSLESGVPSRFSGSGSGTDFTLTISSLQPEDFATYYCQQFNDLFTFGPGTKVDIKR

SEQ ID NO: 1566 - protein, 447 aa, synthetic construct; identical to SEQ ID NO: 1
  source 1..447: note = UGX354 heavy chain sequence

SEQ ID NO: 1567 - protein, 213 aa, synthetic construct
  source 1..213: note = UGX354 light chain sequence
AIQLTQSPSSLSASVGDRVTITCRASQGISSALVWYQQKPGKAPKLLIYDASSLESGVPSRFSGSGSGTDFTLTISSLQPEDFATYYCQQFNDKFTFGPGTKVDIKRTVAAPSVFIFPPSDEQLKSGTASVVCLLNNFYPREAKVQWKVDNALQSGNSQESVTEQDSKDSTYSLSSTLTLSKADYEKHKVYACEVTHQGLSSPVTKSFNRGEC

SEQ ID NO: 1568 - protein, 117 aa, synthetic construct; identical to SEQ ID NO: 3
  source 1..117: note = UGX354 heavy chain variable region sequence

SEQ ID NO: 1569 - protein, 107 aa, synthetic construct
  source 1..107: note = UGX354 light chain variable region sequence
AIQLTQSPSSLSASVGDRVTITCRASQGISSALVWYQQKPGKAPKLLIYDASSLESGVPSRFSGSGSGTDFTLTISSLQPEDFATYYCQQFNDKFTFGPGTKVDIKR

SEQ ID NO: 1570 - protein, 447 aa, synthetic construct; identical to SEQ ID NO: 1
  source 1..447: note = UGX355 heavy chain sequence

SEQ ID NO: 1571 - protein, 213 aa, synthetic construct
  source 1..213: note = UGX355 light chain sequence
AIQLTQSPSSLSASVGDRVTITCRASQGISSALVWYQQKPGKAPKLLIYDASSLESGVPSRFSGSGSGTDFTLTISSLQPEDFATYYCQQFNDMFTFGPGTKVDIKRTVAAPSVFIFPPSDEQLKSGTASVVCLLNNFYPREAKVQWKVDNALQSGNSQESVTEQDSKDSTYSLSSTLTLSKADYEKHKVYACEVTHQGLSSPVTKSFNRGEC

SEQ ID NO: 1572 - protein, 117 aa, synthetic construct; identical to SEQ ID NO: 3
  source 1..117: note = UGX355 heavy chain variable region sequence

SEQ ID NO: 1573 - protein, 107 aa, synthetic construct
  source 1..107: note = UGX355 light chain variable region sequence
AIQLTQSPSSLSASVGDRVTITCRASQGISSALVWYQQKPGKAPKLLIYDASSLESGVPSRFSGSGSGTDFTLTISSLQPEDFATYYCQQFNDMFTFGPGTKVDIKR

SEQ ID NO: 1574 - protein, 447 aa, synthetic construct; identical to SEQ ID NO: 1
  source 1..447: note = UGX356 heavy chain sequence

SEQ ID NO: 1575 - protein, 213 aa, synthetic construct
  source 1..213: note = UGX356 light chain sequence
AIQLTQSPSSLSASVGDRVTITCRASQGISSALVWYQQKPGKAPKLLIYDASSLESGVPSRFSGSGSGTDFTLTISSLQPEDFATYYCQQFNDPFTFGPGTKVDIKRTVAAPSVFIFPPSDEQLKSGTASVVCLLNNFYPREAKVQWKVDNALQSGNSQESVTEQDSKDSTYSLSSTLTLSKADYEKHKVYACEVTHQGLSSPVTKSFNRGEC

SEQ ID NO: 1576 - protein, 117 aa, synthetic construct; identical to SEQ ID NO: 3
  source 1..117: note = UGX356 heavy chain variable region sequence

SEQ ID NO: 1577 - protein, 107 aa, synthetic construct
  source 1..107: note = UGX356 light chain variable region sequence
AIQLTQSPSSLSASVGDRVTITCRASQGISSALVWYQQKPGKAPKLLIYDASSLESGVPSRFSGSGSGTDFTLTISSLQPEDFATYYCQQFNDPFTFGPGTKVDIKR

SEQ ID NO: 1578 - protein, 447 aa, synthetic construct; identical to SEQ ID NO: 1
  source 1..447: note = UGX357 heavy chain sequence

SEQ ID NO: 1579 - protein, 213 aa, synthetic construct
  source 1..213: note = UGX357 light chain sequence
AIQLTQSPSSLSASVGDRVTITCRASQGISSALVWYQQKPGKAPKLLIYDASSLESGVPSRFSGSGSGTDFTLTISSLQPEDFATYYCQQFNDWFTFGPGTKVDIKRTVAAPSVFIFPPSDEQLKSGTASVVCLLNNFYPREAKVQWKVDNALQSGNSQESVTEQDSKDSTYSLSSTLTLSKADYEKHKVYACEVTHQGLSSPVTKSFNRGEC

SEQ ID NO: 1580 - protein, 117 aa, synthetic construct; identical to SEQ ID NO: 3
  source 1..117: note = UGX357 heavy chain variable region sequence

SEQ ID NO: 1581 - protein, 107 aa, synthetic construct
  source 1..107: note = UGX357 light chain variable region sequence
AIQLTQSPSSLSASVGDRVTITCRASQGISSALVWYQQKPGKAPKLLIYDASSLESGVPSRFSGSGSGTDFTLTISSLQPEDFATYYCQQFNDWFTFGPGTKVDIKR

SEQ ID NO: 1582 - protein, 447 aa, synthetic construct; identical to SEQ ID NO: 1
  source 1..447: note = UGX358 heavy chain sequence

SEQ ID NO: 1583 - protein, 213 aa, synthetic construct
  source 1..213: note = UGX358 light chain sequence
AIQLTQSPSSLSASVGDRVTITCRASQGISSALVWYQQKPGKAPKLLIYDASSLESGVPSRFSGSGSGTDFTLTISSLQPEDFATYYCQQFNDVFTFGPGTKVDIKRTVAAPSVFIFPPSDEQLKSGTASVVCLLNNFYPREAKVQWKVDNALQSGNSQESVTEQDSKDSTYSLSSTLTLSKADYEKHKVYACEVTHQGLSSPVTKSFNRGEC

SEQ ID NO: 1584 - protein, 117 aa, synthetic construct; identical to SEQ ID NO: 3
  source 1..117: note = UGX358 heavy chain variable region sequence

SEQ ID NO: 1585 - protein, 107 aa, synthetic construct
  source 1..107: note = UGX358 light chain variable region sequence
AIQLTQSPSSLSASVGDRVTITCRASQGISSALVWYQQKPGKAPKLLIYDASSLESGVPSRFSGSGSGTDFTLTISSLQPEDFATYYCQQFNDVFTFGPGTKVDIKR

SEQ ID NO: 1586 - protein, 447 aa, synthetic construct; identical to SEQ ID NO: 1
  source 1..447: note = UGX359 heavy chain sequence

SEQ ID NO: 1587 - protein, 213 aa, synthetic construct
  source 1..213: note = UGX359 light chain sequence
AIQLTQSPSSLSASVGDRVTITCRASQGISSALVWYQQKPGKAPKLLIYDASSLESGVPSRFSGSGSGTDFTLTISSLQPEDFATYYCQQFADYFTFGPGTKVDIKRTVAAPSVFIFPPSDEQLKSGTASVVCLLNNFYPREAKVQWKVDNALQSGNSQESVTEQDSKDSTYSLSSTLTLSKADYEKHKVYACEVTHQGLSSPVTKSFNRGEC

SEQ ID NO: 1588 - protein, 117 aa, synthetic construct; identical to SEQ ID NO: 3
  source 1..117: note = UGX359 heavy chain variable region sequence

SEQ ID NO: 1589 - protein, 107 aa, synthetic construct
  source 1..107: note = UGX359 light chain variable region sequence
AIQLTQSPSSLSASVGDRVTITCRASQGISSALVWYQQKPGKAPKLLIYDASSLESGVPSRFSGSGSGTDFTLTISSLQPEDFATYYCQQFADYFTFGPGTKVDIKR

SEQ ID NO: 1590 - protein, 447 aa, synthetic construct; identical to SEQ ID NO: 1
  source 1..447: note = UGX361 heavy chain sequence

SEQ ID NO: 1591 - protein, 213 aa, synthetic construct
  source 1..213: note = UGX361 light chain sequence
AIQLTQSPSSLSASVGDRVTITCRASQGISSALVWYQQKPGKAPKLLIYDASSLESGVPSRFSGSGSGTDFTLTISSLQPEDFATYYCQQFGDYFTFGPGTKVDIKRTVAAPSVFIFPPSDEQLKSGTASVVCLLNNFYPREAKVQWKVDNALQSGNSQESVTEQDSKDSTYSLSSTLTLSKADYEKHKVYACEVTHQGLSSPVTKSFNRGEC

SEQ ID NO: 1592 - protein, 117 aa, synthetic construct; identical to SEQ ID NO: 3
  source 1..117: note = UGX361 heavy chain variable region sequence

SEQ ID NO: 1593 - protein, 107 aa, synthetic construct
  source 1..107: note = UGX361 light chain variable region sequence
AIQLTQSPSSLSASVGDRVTITCRASQGISSALVWYQQKPGKAPKLLIYDASSLESGVPSRFSGSGSGTDFTLTISSLQPEDFATYYCQQFGDYFTFGPGTKVDIKR

SEQ ID NO: 1594 - protein, 447 aa, synthetic construct; identical to SEQ ID NO: 1
  source 1..447: note = UGX362 heavy chain sequence

SEQ ID NO: 1595 - protein, 213 aa, synthetic construct
  source 1..213: note = UGX362 light chain sequence
AIQLTQSPSSLSASVGDRVTITCRASQGISSALVWYQQKPGKAPKLLIYDASSLESGVPSRFSGSGSGTDFTLTISSLQPEDFATYYCQQFHDYFTFGPGTKVDIKRTVAAPSVFIFPPSDEQLKSGTASVVCLLNNFYPREAKVQWKVDNALQSGNSQESVTEQDSKDSTYSLSSTLTLSKADYEKHKVYACEVTHQGLSSPVTKSFNRGEC

SEQ ID NO: 1596 - protein, 117 aa, synthetic construct; identical to SEQ ID NO: 3
  source 1..117: note = UGX362 heavy chain variable region sequence

SEQ ID NO: 1597 - protein, 107 aa, synthetic construct
  source 1..107: note = UGX362 light chain variable region sequence
AIQLTQSPSSLSASVGDRVTITCRASQGISSALVWYQQKPGKAPKLLIYDASSLESGVPSRFSGSGSGTDFTLTISSLQPEDFATYYCQQFHDYFTFGPGTKVDIKR

SEQ ID NO: 1598 - protein, 447 aa, synthetic construct; identical to SEQ ID NO: 1
  source 1..447: note = UGX363 heavy chain sequence

SEQ ID NO: 1599 - protein, 213 aa, synthetic construct; identical to SEQ ID NO: 1439
  source 1..213: note = UGX363 light chain sequence

SEQ ID NO: 1600 - protein, 117 aa, synthetic construct; identical to SEQ ID NO: 3
  source 1..117: note = UGX363 heavy chain variable region sequence

SEQ ID NO: 1601 - protein, 107 aa, synthetic construct; identical to SEQ ID NO: 1441
  source 1..107: note = UGX363 light chain variable region sequence

SEQ ID NO: 1602 - protein, 447 aa, synthetic construct; identical to SEQ ID NO: 1
  source 1..447: note = UGX364 heavy chain sequence

SEQ ID NO: 1603 - protein, 213 aa, synthetic construct; identical to SEQ ID NO: 1427
  source 1..213: note = UGX364 light chain sequence

SEQ ID NO: 1604 - protein, 117 aa, synthetic construct; identical to SEQ ID NO: 3
  source 1..117: note = UGX364 heavy chain variable region sequence

SEQ ID NO: 1605 - protein, 107 aa, synthetic construct; identical to SEQ ID NO: 1429
  source 1..107: note = UGX364 light chain variable region sequence

SEQ ID NO: 1606 - protein, 447 aa, synthetic construct; identical to SEQ ID NO: 1
  source 1..447: note = UGX365 heavy chain sequence

SEQ ID NO: 1607 - protein, 213 aa, synthetic construct
  source 1..213: note = UGX365 light chain sequence
AIQLTQSPSSLSASVGDRVTITCRASQGISSALVWYQQKPGKAPKLLIYDASSLESGVPSRFSGSGSGTDFTLTISSLQPEDFATYYCQQFKDYFTFGPGTKVDIKRTVAAPSVFIFPPSDEQLKSGTASVVCLLNNFYPREAKVQWKVDNALQSGNSQESVTEQDSKDSTYSLSSTLTLSKADYEKHKVYACEVTHQGLSSPVTKSFNRGEC

SEQ ID NO: 1608 - protein, 117 aa, synthetic construct; identical to SEQ ID NO: 3
  source 1..117: note = UGX365 heavy chain variable region sequence

SEQ ID NO: 1609 - protein, 107 aa, synthetic construct
  source 1..107: note = UGX365 light chain variable region sequence
AIQLTQSPSSLSASVGDRVTITCRASQGISSALVWYQQKPGKAPKLLIYDASSLESGVPSRFSGSGSGTDFTLTISSLQPEDFATYYCQQFKDYFTFGPGTKVDIKR

SEQ ID NO: 1610 - protein, 447 aa, synthetic construct; identical to SEQ ID NO: 1
  source 1..447: note = UGX366 heavy chain sequence

SEQ ID NO: 1611 - protein, 213 aa, synthetic construct
  source 1..213: note = UGX366 light chain sequence
AIQLTQSPSSLSASVGDRVTITCRASQGISSALVWYQQKPGKAPKLLIYDASSLESGVPSRFSGSGSGTDFTLTISSLQPEDFATYYCQQFMDYFTFGPGTKVDIKRTVAAPSVFIFPPSDEQLKSGTASVVCLLNNFYPREAKVQWKVDNALQSGNSQESVTEQDSKDSTYSLSSTLTLSKADYEKHKVYACEVTHQGLSSPVTKSFNRGEC

SEQ ID NO: 1612 - protein, 117 aa, synthetic construct; identical to SEQ ID NO: 3
  source 1..117: note = UGX366 heavy chain variable region sequence

SEQ ID NO: 1613 - protein, 107 aa, synthetic construct
  source 1..107: note = UGX366 light chain variable region sequence
AIQLTQSPSSLSASVGDRVTITCRASQGISSALVWYQQKPGKAPKLLIYDASSLESGVPSRFSGSGSGTDFTLTISSLQPEDFATYYCQQFMDYFTFGPGTKVDIKR

SEQ ID NO: 1614 - protein, 447 aa, synthetic construct; identical to SEQ ID NO: 1
  source 1..447: note = UGX367 heavy chain sequence

SEQ ID NO: 1615 - protein, 213 aa, synthetic construct
  source 1..213: note = UGX367 light chain sequence
AIQLTQSPSSLSASVGDRVTITCRASQGISSALVWYQQKPGKAPKLLIYDASSLESGVPSRFSGSGSGTDFTLTISSLQPEDFATYYCQQFPDYFTFGPGTKVDIKRTVAAPSVFIFPPSDEQLKSGTASVVCLLNNFYPREAKVQWKVDNALQSGNSQESVTEQDSKDSTYSLSSTLTLSKADYEKHKVYACEVTHQGLSSPVTKSFNRGEC

SEQ ID NO: 1616 - protein, 117 aa, synthetic construct; identical to SEQ ID NO: 3
  source 1..117: note = UGX367 heavy chain variable region sequence

SEQ ID NO: 1617 - protein, 107 aa, synthetic construct
  source 1..107: note = UGX367 light chain variable region sequence
AIQLTQSPSSLSASVGDRVTITCRASQGISSALVWYQQKPGKAPKLLIYDASSLESGVPSRFSGSGSGTDFTLTISSLQPEDFATYYCQQFPDYFTFGPGTKVDIKR

SEQ ID NO: 1618 - protein, 447 aa, synthetic construct; identical to SEQ ID NO: 1
  source 1..447: note = UGX368 heavy chain sequence

SEQ ID NO: 1619 - protein, 213 aa, synthetic construct
  source 1..213: note = UGX368 light chain sequence
AIQLTQSPSSLSASVGDRVTITCRASQGISSALVWYQQKPGKAPKLLIYDASSLESGVPSRFSGSGSGTDFTLTISSLQPEDFATYYCQQFWDYFTFGPGTKVDIKRTVAAPSVFIFPPSDEQLKSGTASVVCLLNNFYPREAKVQWKVDNALQSGNSQESVTEQDSKDSTYSLSSTLTLSKADYEKHKVYACEVTHQGLSSPVTKSFNRGEC

SEQ ID NO: 1620 - protein, 117 aa, synthetic construct; identical to SEQ ID NO: 3
  source 1..117: note = UGX368 heavy chain variable region sequence

SEQ ID NO: 1621 - protein, 107 aa, synthetic construct
  source 1..107: note = UGX368 light chain variable region sequence
AIQLTQSPSSLSASVGDRVTITCRASQGISSALVWYQQKPGKAPKLLIYDASSLESGVPSRFSGSGSGTDFTLTISSLQPEDFATYYCQQFWDYFTFGPGTKVDIKR

SEQ ID NO: 1622 - protein, 447 aa, synthetic construct; identical to SEQ ID NO: 1
  source 1..447: note = UGX369 heavy chain sequence

SEQ ID NO: 1623 - protein, 213 aa, synthetic construct
  source 1..213: note = UGX369 light chain sequence
AIQLTQSPSSLSASVGDRVTITCRASQGISSALVWYQQKPGKAPKLLIYDASSLESGVPSRFSGSGSGTDFTLTISSLQPEDFATYYCQQFVDYFTFGPGTKVDIKRTVAAPSVFIFPPSDEQLKSGTASVVCLLNNFYPREAKVQWKVDNALQSGNSQESVTEQDSKDSTYSLSSTLTLSKADYEKHKVYACEVTHQGLSSPVTKSFNRGEC

SEQ ID NO: 1624 - protein, 117 aa, synthetic construct; identical to SEQ ID NO: 3
  source 1..117: note = UGX369 heavy chain variable region sequence

SEQ ID NO: 1625 - protein, 107 aa, synthetic construct
  source 1..107: note = UGX369 light chain variable region sequence
AIQLTQSPSSLSASVGDRVTITCRASQGISSALVWYQQKPGKAPKLLIYDASSLESGVPSRFSGSGSGTDFTLTISSLQPEDFATYYCQQFVDYFTFGPGTKVDIKR

SEQ ID NO: 1626 - protein, 447 aa, synthetic construct
  source 1..447: note = UGX370 heavy chain sequence
QVQLVQSGAEVKKPGASVKVSCKASGYTFTNHYMHWVRQAPGQGLEWMGIINPISGSTSNAQKFQGRVTMTRDTSTSTVYMELSSLRSEDTAVYYCARDIVDIFDFWGQGTMVTVSSASTKGPSVFPLAPSSKSTSGGTAALGCLVKDYFPEPVTVSWNSGALTSGVHTFPAVLQSSGLYSLSSVVTVPSSSLGTQTYICNVNHKPSNTKVDKKVEPKSCDKTHTCPPCPAPELLGGPSVFLFPPKPKDTLMISRTPEVTCVVVDVSHEDPEVKFNWYVDGVEVHNAKTKPREEQYNSTYRVVSVLTVLHQDWLNGKEYKCKVSNKALPAPIEKTISKAKGQPREPQVYTLPPSRDELTKNQVSLTCLVKGFYPSDIAVEWESNGQPENNYKTTPPVLDSDGSFFLYSKLTVDKSRWQQGNVFSCSVMHEALHNHYTQKSLSLSPGK

SEQ ID NO: 1627 - protein, 213 aa, synthetic construct; identical to SEQ ID NO: 2
  source 1..213: note = UGX370 light chain sequence

SEQ ID NO: 1628 - protein, 117 aa, synthetic construct
  source 1..117: note = UGX370 heavy chain variable region sequence
QVQLVQSGAEVKKPGASVKVSCKASGYTFTNHYMHWVRQAPGQGLEWMGIINPISGSTSNAQKFQGRVTMTRDTSTSTVYMELSSLRSEDTAVYYCARDIVDIFDFWGQGTMVTVSS

SEQ ID NO: 1629 - protein, 107 aa, synthetic construct; identical to SEQ ID NO: 4
  source 1..107: note = UGX370 light chain variable region sequence

SEQ ID NO: 1630 - protein, 447 aa, synthetic construct
  source 1..447: note = UGX371 heavy chain sequence
QVQLVQSGAEVKKPGASVKVSCKASGYTFTNHYMHWVRQAPGQGLEWMGIINPISGSTSNAQKFQGRVTMTRDTSTSTVYMELSSLRSEDTAVYYCARDIVDLFDFWGQGTMVTVSSASTKGPSVFPLAPSSKSTSGGTAALGCLVKDYFPEPVTVSWNSGALTSGVHTFPAVLQSSGLYSLSSVVTVPSSSLGTQTYICNVNHKPSNTKVDKKVEPKSCDKTHTCPPCPAPELLGGPSVFLFPPKPKDTLMISRTPEVTCVVVDVSHEDPEVKFNWYVDGVEVHNAKTKPREEQYNSTYRVVSVLTVLHQDWLNGKEYKCKVSNKALPAPIEKTISKAKGQPREPQVYTLPPSRDELTKNQVSLTCLVKGFYPSDIAVEWESNGQPENNYKTTPPVLDSDGSFFLYSKLTVDKSRWQQGNVFSCSVMHEALHNHYTQKSLSLSPGK

SEQ ID NO: 1631 - protein, 213 aa, synthetic construct; identical to SEQ ID NO: 2
  source 1..213: note = UGX371 light chain sequence

SEQ ID NO: 1632 - protein, 117 aa, synthetic construct
  source 1..117: note = UGX371 heavy chain variable region sequence
QVQLVQSGAEVKKPGASVKVSCKASGYTFTNHYMHWVRQAPGQGLEWMGIINPISGSTSNAQKFQGRVTMTRDTSTSTVYMELSSLRSEDTAVYYCARDIVDLFDFWGQGTMVTVSS

SEQ ID NO: 1633 - protein, 107 aa, synthetic construct; identical to SEQ ID NO: 4
  source 1..107: note = UGX371 light chain variable region sequence

SEQ ID NO: 1634 - protein, 447 aa, synthetic construct
  source 1..447: note = UGX372 heavy chain sequence
QVQLVQSGAEVKKPGASVKVSCKASGYTFTNHYMHWVRQAPGQGLEWMGIINPISGSTSNAQKFQGRVTMTRDTSTSTVYMELSSLRSEDTAVYYCARDIVDRFDFWGQGTMVTVSSASTKGPSVFPLAPSSKSTSGGTAALGCLVKDYFPEPVTVSWNSGALTSGVHTFPAVLQSSGLYSLSSVVTVPSSSLGTQTYICNVNHKPSNTKVDKKVEPKSCDKTHTCPPCPAPELLGGPSVFLFPPKPKDTLMISRTPEVTCVVVDVSHEDPEVKFNWYVDGVEVHNAKTKPREEQYNSTYRVVSVLTVLHQDWLNGKEYKCKVSNKALPAPIEKTISKAKGQPREPQVYTLPPSRDELTKNQVSLTCLVKGFYPSDIAVEWESNGQPENNYKTTPPVLDSDGSFFLYSKLTVDKSRWQQGNVFSCSVMHEALHNHYTQKSLSLSPGK

SEQ ID NO: 1635 - protein, 213 aa, synthetic construct; identical to SEQ ID NO: 2
  source 1..213: note = UGX372 light chain sequence

SEQ ID NO: 1636 - protein, 117 aa, synthetic construct
  source 1..117: note = UGX372 heavy chain variable region sequence
QVQLVQSGAEVKKPGASVKVSCKASGYTFTNHYMHWVRQAPGQGLEWMGIINPISGSTSNAQKFQGRVTMTRDTSTSTVYMELSSLRSEDTAVYYCARDIVDRFDFWGQGTMVTVSS

SEQ ID NO: 1637 - protein, 107 aa, synthetic construct; identical to SEQ ID NO: 4
  source 1..107: note = UGX372 light chain variable region sequence

SEQ ID NO: 1638 - protein, 447 aa, synthetic construct
  source 1..447: note = UGX373 heavy chain sequence
QVQLVQSGAEVKKPGASVKVSCKASGYTFTNHYMHWVRQAPGQGLEWMGIINPISGSTSNAQKFQGRVTMTRDTSTSTVYMELSSLRSEDTAVYYCARDIVDNFDFWGQGTMVTVSSASTKGPSVFPLAPSSKSTSGGTAALGCLVKDYFPEPVTVSWNSGALTSGVHTFPAVLQSSGLYSLSSVVTVPSSSLGTQTYICNVNHKPSNTKVDKKVEPKSCDKTHTCPPCPAPELLGGPSVFLFPPKPKDTLMISRTPEVTCVVVDVSHEDPEVKFNWYVDGVEVHNAKTKPREEQYNSTYRVVSVLTVLHQDWLNGKEYKCKVSNKALPAPIEKTISKAKGQPREPQVYTLPPSRDELTKNQVSLTCLVKGFYPSDIAVEWESNGQPENNYKTTPPVLDSDGSFFLYSKLTVDKSRWQQGNVFSCSVMHEALHNHYTQKSLSLSPGK

SEQ ID NO: 1639 - protein, 213 aa, synthetic construct; identical to SEQ ID NO: 2
  source 1..213: note = UGX373 light chain sequence

SEQ ID NO: 1640 - protein, 117 aa, synthetic construct
  source 1..117: note = UGX373 heavy chain variable region sequence
QVQLVQSGAEVKKPGASVKVSCKASGYTFTNHYMHWVRQAPGQGLEWMGIINPISGSTSNAQKFQGRVTMTRDTSTSTVYMELSSLRSEDTAVYYCARDIVDNFDFWGQGTMVTVSS

SEQ ID NO: 1641 - protein, 107 aa, synthetic construct; identical to SEQ ID NO: 4
  source 1..107: note = UGX373 light chain variable region sequence

SEQ ID NO: 1642 - protein, 447 aa, synthetic construct
  source 1..447: note = UGX374 heavy chain sequence
QVQLVQSGAEVKKPGASVKVSCKASGYTFTNHYMHWVRQAPGQGLEWMGIINPISGSTSNAQKFQGRVTMTRDTSTSTVYMELSSLRSEDTAVYYCARDIVDGFDFWGQGTMVTVSSASTKGPSVFPLAPSSKSTSGGTAALGCLVKDYFPEPVTVSWNSGALTSGVHTFPAVLQSSGLYSLSSVVTVPSSSLGTQTYICNVNHKPSNTKVDKKVEPKSCDKTHTCPPCPAPELLGGPSVFLFPPKPKDTLMISRTPEVTCVVVDVSHEDPEVKFNWYVDGVEVHNAKTKPREEQYNSTYRVVSVLTVLHQDWLNGKEYKCKVSNKALPAPIEKTISKAKGQPREPQVYTLPPSRDELTKNQVSLTCLVKGFYPSDIAVEWESNGQPENNYKTTPPVLDSDGSFFLYSKLTVDKSRWQQGNVFSCSVMHEALHNHYTQKSLSLSPGK

SEQ ID NO: 1643 - protein, 213 aa, synthetic construct; identical to SEQ ID NO: 2
  source 1..213: note = UGX374 light chain sequence

SEQ ID NO: 1644 - protein, 117 aa, synthetic construct
  source 1..117: note = UGX374 heavy chain variable region sequence
QVQLVQSGAEVKKPGASVKVSCKASGYTFTNHYMHWVRQAPGQGLEWMGIINPISGSTSNAQKFQGRVTMTRDTSTSTVYMELSSLRSEDTAVYYCARDIVDGFDFWGQGTMVTVSS

SEQ ID NO: 1645 - protein, 107 aa, synthetic construct; identical to SEQ ID NO: 4
  source 1..107: note = UGX374 light chain variable region sequence

SEQ ID NO: 1646 - protein, 447 aa, synthetic construct
  source 1..447: note = UGX375 heavy chain sequence
QVQLVQSGAEVKKPGASVKVSCKASGYTFTNHYMHWVRQAPGQGLEWMGIINPISGSTSNAQKFQGRVTMTRDTSTSTVYMELSSLRSEDTAVYYCARDIVDHFDFWGQGTMVTVSSASTKGPSVFPLAPSSKSTSGGTAALGCLVKDYFPEPVTVSWNSGALTSGVHTFPAVLQSSGLYSLSSVVTVPSSSLGTQTYICNVNHKPSNTKVDKKVEPKSCDKTHTCPPCPAPELLGGPSVFLFPPKPKDTLMISRTPEVTCVVVDVSHEDPEVKFNWYVDGVEVHNAKTKPREEQYNSTYRVVSVLTVLHQDWLNGKEYKCKVSNKALPAPIEKTISKAKGQPREPQVYTLPPSRDELTKNQVSLTCLVKGFYPSDIAVEWESNGQPENNYKTTPPVLDSDGSFFLYSKLTVDKSRWQQGNVFSCSVMHEALHNHYTQKSLSLSPGK

SEQ ID NO: 1647 - protein, 213 aa, synthetic construct; identical to SEQ ID NO: 2
  source 1..213: note = UGX375 light chain sequence

SEQ ID NO: 1648 - protein, 117 aa, synthetic construct
  source 1..117: note = UGX375 heavy chain variable region sequence
QVQLVQSGAEVKKPGASVKVSCKASGYTFTNHYMHWVRQAPGQGLEWMGIINPISGSTSNAQKFQGRVTMTRDTSTSTVYMELSSLRSEDTAVYYCARDIVDHFDFWGQGTMVTVSS

SEQ ID NO: 1649 - protein, 107 aa, synthetic construct; identical to SEQ ID NO: 4
  source 1..107: note = UGX375 light chain variable region sequence

SEQ ID NO: 1650 - protein, 447 aa, synthetic construct
  source 1..447: note = UGX376 heavy chain sequence
QVQLVQSGAEVKKPGASVKVSCKASGYTFTNHYMHWVRQAPGQGLEWMGIINPISGSTSNAQKFQGRVTMTRDTSTSTVYMELSSLRSEDTAVYYCARDIVDKFDFWGQGTMVTVSSASTKGPSVFPLAPSSKSTSGGTAALGCLVKDYFPEPVTVSWNSGALTSGVHTFPAVLQSSGLYSLSSVVTVPSSSLGTQTYICNVNHKPSNTKVDKKVEPKSCDKTHTCPPCPAPELLGGPSVFLFPPKPKDTLMISRTPEVTCVVVDVSHEDPEVKFNWYVDGVEVHNAKTKPREEQYNSTYRVVSVLTVLHQDWLNGKEYKCKVSNKALPAPIEKTISKAKGQPREPQVYTLPPSRDELTKNQVSLTCLVKGFYPSDIAVEWESNGQPENNYKTTPPVLDSDGSFFLYSKLTVDKSRWQQGNVFSCSVMHEALHNHYTQKSLSLSPGK

SEQ ID NO: 1651 - protein, 213 aa, synthetic construct; identical to SEQ ID NO: 2
  source 1..213: note = UGX376 light chain sequence

SEQ ID NO: 1652 - protein, 117 aa, synthetic construct
  source 1..117: note = UGX376 heavy chain variable region sequence
QVQLVQSGAEVKKPGASVKVSCKASGYTFTNHYMHWVRQAPGQGLEWMGIINPISGSTSNAQKFQGRVTMTRDTSTSTVYMELSSLRSEDTAVYYCARDIVDKFDFWGQGTMVTVSS

SEQ ID NO: 1653 - protein, 107 aa, synthetic construct; identical to SEQ ID NO: 4
  source 1..107: note = UGX376 light chain variable region sequence

SEQ ID NO: 1654 - protein, 447 aa, synthetic construct
  source 1..447: note = UGX377 heavy chain sequence
QVQLVQSGAEVKKPGASVKVSCKASGYTFTNHYMHWVRQAPGQGLEWMGIINPISGSTSNAQKFQGRVTMTRDTSTSTVYMELSSLRSEDTAVYYCARDIVDMFDFWGQGTMVTVSSASTKGPSVFPLAPSSKSTSGGTAALGCLVKDYFPEPVTVSWNSGALTSGVHTFPAVLQSSGLYSLSSVVTVPSSSLGTQTYICNVNHKPSNTKVDKKVEPKSCDKTHTCPPCPAPELLGGPSVFLFPPKPKDTLMISRTPEVTCVVVDVSHEDPEVKFNWYVDGVEVHNAKTKPREEQYNSTYRVVSVLTVLHQDWLNGKEYKCKVSNKALPAPIEKTISKAKGQPREPQVYTLPPSRDELTKNQVSLTCLVKGFYPSDIAVEWESNGQPENNYKTTPPVLDSDGSFFLYSKLTVDKSRWQQGNVFSCSVMHEALHNHYTQKSLSLSPGK

SEQ ID NO: 1655 - protein, 213 aa, synthetic construct; identical to SEQ ID NO: 2
  source 1..213: note = UGX377 light chain sequence

SEQ ID NO: 1656 - protein, 117 aa, synthetic construct
  source 1..117: note = UGX377 heavy chain variable region sequence
QVQLVQSGAEVKKPGASVKVSCKASGYTFTNHYMHWVRQAPGQGLEWMGIINPISGSTSNAQKFQGRVTMTRDTSTSTVYMELSSLRSEDTAVYYCARDIVDMFDFWGQGTMVTVSS

SEQ ID NO: 1657 - protein, 107 aa, synthetic construct; identical to SEQ ID NO: 4
  source 1..107: note = UGX377 light chain variable region sequence

SEQ ID NO: 1658 - protein, 447 aa, synthetic construct
  source 1..447: note = UGX378 heavy chain sequence
QVQLVQSGAEVKKPGASVKVSCKASGYTFTNHYMHWVRQAPGQGLEWMGIINPISGSTSNAQKFQGRVTMTRDTSTSTVYMELSSLRSEDTAVYYCARDIVDPFDFWGQGTMVTVSSASTKGPSVFPLAPSSKSTSGGTAALGCLVKDYFPEPVTVSWNSGALTSGVHTFPAVLQSSGLYSLSSVVTVPSSSLGTQTYICNVNHKPSNTKVDKKVEPKSCDKTHTCPPCPAPELLGGPSVFLFPPKPKDTLMISRTPEVTCVVVDVSHEDPEVKFNWYVDGVEVHNAKTKPREEQYNSTYRVVSVLTVLHQDWLNGKEYKCKVSNKALPAPIEKTISKAKGQPREPQVYTLPPSRDELTKNQVSLTCLVKGFYPSDIAVEWESNGQPENNYKTTPPVLDSDGSFFLYSKLTVDKSRWQQGNVFSCSVMHEALHNHYTQKSLSLSPGK

SEQ ID NO: 1659 - protein, 213 aa, synthetic construct; identical to SEQ ID NO: 2
  source 1..213: note = UGX378 light chain sequence

SEQ ID NO: 1660 - protein, 117 aa, synthetic construct
  source 1..117: note = UGX378 heavy chain variable region sequence
QVQLVQSGAEVKKPGASVKVSCKASGYTFTNHYMHWVRQAPGQGLEWMGIINPISGSTSNAQKFQGRVTMTRDTSTSTVYMELSSLRSEDTAVYYCARDIVDPFDFWGQGTMVTVSS

SEQ ID NO: 1661 - protein, 107 aa, synthetic construct; identical to SEQ ID NO: 4
  source 1..107: note = UGX378 light chain variable region sequence

SEQ ID NO: 1662 - protein, 447 aa, synthetic construct
  source 1..447: note = UGX379 heavy chain sequence
QVQLVQSGAEVKKPGASVKVSCKASGYTFTNHYMHWVRQAPGQGLEWMGIINPISGSTSNAQKFQGRVTMTRDTSTSTVYMELSSLRSEDTAVYYCARDIVDWFDFWGQGTMVTVSSASTKGPSVFPLAPSSKSTSGGTAALGCLVKDYFPEPVTVSWNSGALTSGVHTFPAVLQSSGLYSLSSVVTVPSSSLGTQTYICNVNHKPSNTKVDKKVEPKSCDKTHTCPPCPAPELLGGPSVFLFPPKPKDTLMISRTPEVTCVVVDVSHEDPEVKFNWYVDGVEVHNAKTKPREEQYNSTYRVVSVLTVLHQDWLNGKEYKCKVSNKALPAPIEKTISKAKGQPREPQVYTLPPSRDELTKNQVSLTCLVKGFYPSDIAVEWESNGQPENNYKTTPPVLDSDGSFFLYSKLTVDKSRWQQGNVFSCSVMHEALHNHYTQKSLSLSPGK

SEQ ID NO: 1663 - protein, 213 aa, synthetic construct; identical to SEQ ID NO: 2
  source 1..213: note = UGX379 light chain sequence

SEQ ID NO: 1664 - protein, 117 aa, synthetic construct
  source 1..117: note = UGX379 heavy chain variable region sequence
QVQLVQSGAEVKKPGASVKVSCKASGYTFTNHYMHWVRQAPGQGLEWMGIINPISGSTSNAQKFQGRVTMTRDTSTSTVYMELSSLRSEDTAVYYCARDIVDWFDFWGQGTMVTVSS

SEQ ID NO: 1665 - protein, 107 aa, synthetic construct; identical to SEQ ID NO: 4
  source 1..107: note = UGX379 light chain variable region sequence

SEQ ID NO: 1666 - protein, 447 aa, synthetic construct
  source 1..447: note = UGX380 heavy chain sequence
QVQLVQSGAEVKKPGASVKVSCKASGYTFTNHYMHWVRQAPGQGLEWMGIINPISGSTSNAQKFQGRVTMTRDTSTSTVYMELSSLRSEDTAVYYCARDIVDVFDFWGQGTMVTVSSASTKGPSVFPLAPSSKSTSGGTAALGCLVKDYFPEPVTVSWNSGALTSGVHTFPAVLQSSGLYSLSSVVTVPSSSLGTQTYICNVNHKPSNTKVDKKVEPKSCDKTHTCPPCPAPELLGGPSVFLFPPKPKDTLMISRTPEVTCVVVDVSHEDPEVKFNWYVDGVEVHNAKTKPREEQYNSTYRVVSVLTVLHQDWLNGKEYKCKVSNKALPAPIEKTISKAKGQPREPQVYTLPPSRDELTKNQVSLTCLVKGFYPSDIAVEWESNGQPENNYKTTPPVLDSDGSFFLYSKLTVDKSRWQQGNVFSCSVMHEALHNHYTQKSLSLSPGK

SEQ ID NO: 1667 - protein, 213 aa, synthetic construct; identical to SEQ ID NO: 2
  source 1..213: note = UGX380 light chain sequence

SEQ ID NO: 1668 - protein, 117 aa, synthetic construct
  source 1..117: note = UGX380 heavy chain variable region sequence
QVQLVQSGAEVKKPGASVKVSCKASGYTFTNHYMHWVRQAPGQGLEWMGIINPISGSTSNAQKFQGRVTMTRDTSTSTVYMELSSLRSEDTAVYYCARDIVDVFDFWGQGTMVTVSS

SEQ ID NO: 1669 - protein, 107 aa, synthetic construct; identical to SEQ ID NO: 4
  source 1..107: note = UGX380 light chain variable region sequence

SEQ ID NO: 1670 - protein, 447 aa, synthetic construct; identical to SEQ ID NO: 1222
  source 1..447: note = UGX381 heavy chain sequence

SEQ ID NO: 1671 - protein, 213 aa, synthetic construct; identical to SEQ ID NO: 1111
  source 1..213: note = UGX381 light chain sequence

SEQ ID NO: 1672 - protein, 117 aa, synthetic construct; identical to SEQ ID NO: 222
  source 1..117: note = UGX381 heavy chain variable region sequence

SEQ ID NO: 1673 - protein, 107 aa, synthetic construct; identical to SEQ ID NO: 303
  source 1..107: note = UGX381 light chain variable region sequence

SEQ ID NO: 1674 - protein, 447 aa, synthetic construct; identical to SEQ ID NO: 1206
  source 1..447: note = UGX382 heavy chain sequence

SEQ ID NO: 1675 - protein, 213 aa, synthetic construct; identical to SEQ ID NO: 1111
  source 1..213: note = UGX382 light chain sequence

SEQ ID NO: 1676 - protein, 117 aa, synthetic construct; identical to SEQ ID NO: 214
  source 1..117: note = UGX382 heavy chain variable region sequence

SEQ ID NO: 1677 - protein, 107 aa, synthetic construct; identical to SEQ ID NO: 303
  source 1..107: note = UGX382 light chain variable region sequence

SEQ ID NO: 1678 - protein, 447 aa, synthetic construct; identical to SEQ ID NO: 1222
  source 1..447: note = UGX383 heavy chain sequence

SEQ ID NO: 1679 - protein, 213 aa, synthetic construct; identical to SEQ ID NO: 627
  source 1..213: note = UGX383 light chain sequence

SEQ ID NO: 1680 - protein, 117 aa, synthetic construct; identical to SEQ ID NO: 222
  source 1..117: note = UGX383 heavy chain variable region sequence

SEQ ID NO: 1681 - protein, 107 aa, synthetic construct; identical to SEQ ID NO: 306
  source 1..107: note = UGX383 light chain variable region sequence

SEQ ID NO: 1682 - protein, 447 aa, synthetic construct; identical to SEQ ID NO: 1206
  source 1..447: note = UGX384 heavy chain sequence

SEQ ID NO: 1683 - protein, 213 aa, synthetic construct; identical to SEQ ID NO: 627
  source 1..213: note = UGX384 light chain sequence

SEQ ID NO: 1684 - protein, 117 aa, synthetic construct; identical to SEQ ID NO: 214
  source 1..117: note = UGX384 heavy chain variable region sequence

SEQ ID NO: 1685 - protein, 107 aa, synthetic construct; identical to SEQ ID NO: 306
  source 1..107: note = UGX384 light chain variable region sequence

SEQ ID NO: 1686 - protein, 447 aa, synthetic construct; identical to SEQ ID NO: 1210
  source 1..447: note = UGX385 heavy chain sequence

SEQ ID NO: 1687 - protein, 213 aa, synthetic construct; identical to SEQ ID NO: 628
  source 1..213: note = UGX385 light chain sequence

SEQ ID NO: 1688 - protein, 117 aa, synthetic construct; identical to SEQ ID NO: 215
  source 1..117: note = UGX385 heavy chain variable region sequence

SEQ ID NO: 1689 - protein, 107 aa, synthetic construct; identical to SEQ ID NO: 339
  source 1..107: note = UGX385 light chain variable region sequence

SEQ ID NO: 1690 - protein, 447 aa, synthetic construct; identical to SEQ ID NO: 1
  source 1..447: note = UGX386 heavy chain sequence

SEQ ID NO: 1691 - protein, 213 aa, synthetic construct
  source 1..213: note = UGX386 light chain sequence
AIQLTQSPSSLSASVGDRVTITCRASQGISSALVWYQQKPGKAPKLLIYDAASLESGVPSRFSGSGSGTDFTLTISSLQPEDFATYYCQQFNDYFTFGPGTKVDIKRTVAAPSVFIFPPSDEQLKSGTASVVCLLNNFYPREAKVQWKVDNALQSGNSQESVTEQDSKDSTYSLSSTLTLSKADYEKHKVYACEVTHQGLSSPVTKSFNRGEC

SEQ ID NO: 1692 - protein, 117 aa, synthetic construct; identical to SEQ ID NO: 3
  source 1..117: note = UGX386 heavy chain variable region sequence

SEQ ID NO: 1693 - protein, 107 aa, synthetic construct
  source 1..107: note = UGX386 light chain variable region sequence
AIQLTQSPSSLSASVGDRVTITCRASQGISSALVWYQQKPGKAPKLLIYDAASLESGVPSRFSGSGSGTDFTLTISSLQPEDFATYYCQQFNDYFTFGPGTKVDIKR

SEQ ID NO: 1694 - protein, 447 aa, synthetic construct; identical to SEQ ID NO: 1
  source 1..447: note = UGX388 heavy chain sequence

SEQ ID NO: 1695 - protein, 213 aa, synthetic construct
  source 1..213: note = UGX388 light chain sequence
AIQLTQSPSSLSASVGDRVTITCRASQGISSALVWYQQKPGKAPKLLIYDANSLESGVPSRFSGSGSGTDFTLTISSLQPEDFATYYCQQFNDYFTFGPGTKVDIKRTVAAPSVFIFPPSDEQLKSGTASVVCLLNNFYPREAKVQWKVDNALQSGNSQESVTEQDSKDSTYSLSSTLTLSKADYEKHKVYACEVTHQGLSSPVTKSFNRGEC

SEQ ID NO: 1696 - protein, 117 aa, synthetic construct; identical to SEQ ID NO: 3
  source 1..117: note = UGX388 heavy chain variable region sequence

SEQ ID NO: 1697 - protein, 107 aa, synthetic construct
  source 1..107: note = UGX388 light chain variable region sequence
AIQLTQSPSSLSASVGDRVTITCRASQGISSALVWYQQKPGKAPKLLIYDANSLESGVPSRFSGSGSGTDFTLTISSLQPEDFATYYCQQFNDYFTFGPGTKVDIKR

SEQ ID NO: 1698 - protein, 447 aa, synthetic construct; identical to SEQ ID NO: 1
  source 1..447: note = UGX389 heavy chain sequence

SEQ ID NO: 1699 - protein, 213 aa, synthetic construct
  source 1..213: note = UGX389 light chain sequence
AIQLTQSPSSLSASVGDRVTITCRASQGISSALVWYQQKPGKAPKLLIYDAGSLESGVPSRFSGSGSGTDFTLTISSLQPEDFATYYCQQFNDYFTFGPGTKVDIKRTVAAPSVFIFPPSDEQLKSGTASVVCLLNNFYPREAKVQWKVDNALQSGNSQESVTEQDSKDSTYSLSSTLTLSKADYEKHKVYACEVTHQGLSSPVTKSFNRGEC

SEQ ID NO: 1700 - protein, 117 aa, synthetic construct; identical to SEQ ID NO: 3
  source 1..117: note = UGX389 heavy chain variable region sequence

SEQ ID NO: 1701 - protein, 107 aa, synthetic construct
  source 1..107: note = UGX389 light chain variable region sequence
AIQLTQSPSSLSASVGDRVTITCRASQGISSALVWYQQKPGKAPKLLIYDAGSLESGVPSRFSGSGSGTDFTLTISSLQPEDFATYYCQQFNDYFTFGPGTKVDIKR

SEQ ID NO: 1702 - protein, 447 aa, synthetic construct; identical to SEQ ID NO: 1
  source 1..447: note = UGX390 heavy chain sequence

SEQ ID NO: 1703 - protein, 213 aa, synthetic construct
  source 1..213: note = UGX390 light chain sequence
AIQLTQSPSSLSASVGDRVTITCRASQGISSALVWYQQKPGKAPKLLIYDAHSLESGVPSRFSGSGSGTDFTLTISSLQPEDFATYYCQQFNDYFTFGPGTKVDIKRTVAAPSVFIFPPSDEQLKSGTASVVCLLNNFYPREAKVQWKVDNALQSGNSQESVTEQDSKDSTYSLSSTLTLSKADYEKHKVYACEVTHQGLSSPVTKSFNRGEC

SEQ ID NO: 1704 - protein, 117 aa, synthetic construct; identical to SEQ ID NO: 3
  source 1..117: note = UGX390 heavy chain variable region sequence

SEQ ID NO: 1705 - protein, 107 aa, synthetic construct
  source 1..107: note = UGX390 light chain variable region sequence
AIQLTQSPSSLSASVGDRVTITCRASQGISSALVWYQQKPGKAPKLLIYDAHSLESGVPSRFSGSGSGTDFTLTISSLQPEDFATYYCQQFNDYFTFGPGTKVDIKR

SEQ ID NO: 1706 - protein, 447 aa, synthetic construct; identical to SEQ ID NO: 1
  source 1..447: note = UGX391 heavy chain sequence

SEQ ID NO: 1707 - protein, 213 aa, synthetic construct
  source 1..213: note = UGX391 light chain sequence
AIQLTQSPSSLSASVGDRVTITCRASQGISSALVWYQQKPGKAPKLLIYDAISLESGVPSRFSGSGSGTDFTLTISSLQPEDFATYYCQQFNDYFTFGPGTKVDIKRTVAAPSVFIFPPSDEQLKSGTASVVCLLNNFYPREAKVQWKVDNALQSGNSQESVTEQDSKDSTYSLSSTLTLSKADYEKHKVYACEVTHQGLSSPVTKSFNRGEC

SEQ ID NO: 1708 - protein, 117 aa, synthetic construct; identical to SEQ ID NO: 3
  source 1..117: note = UGX391 heavy chain variable region sequence

SEQ ID NO: 1709 - protein, 107 aa, synthetic construct
  source 1..107: note = UGX391 light chain variable region sequence
AIQLTQSPSSLSASVGDRVTITCRASQGISSALVWYQQKPGKAPKLLIYDAISLESGVPSRFSGSGSGTDFTLTISSLQPEDFATYYCQQFNDYFTFGPGTKVDIKR

SEQ ID NO: 1710 - protein, 447 aa, synthetic construct; identical to SEQ ID NO: 1
  source 1..447: note = UGX392 heavy chain sequence

SEQ ID NO: 1711 - protein, 213 aa, synthetic construct
  source 1..213: note = UGX392 light chain sequence
AIQLTQSPSSLSASVGDRVTITCRASQGISSALVWYQQKPGKAPKLLIYDALSLESGVPSRFSGSGSGTDFTLTISSLQPEDFATYYCQQFNDYFTFGPGTKVDIKRTVAAPSVFIFPPSDEQLKSGTASVVCLLNNFYPREAKVQWKVDNALQSGNSQESVTEQDSKDSTYSLSSTLTLSKADYEKHKVYACEVTHQGLSSPVTKSFNRGEC

SEQ ID NO: 1712 - protein, 117 aa, synthetic construct; identical to SEQ ID NO: 3
  source 1..117: note = UGX392 heavy chain variable region sequence

SEQ ID NO: 1713 - protein, 107 aa, synthetic construct
  source 1..107: note = UGX392 light chain variable region sequence
AIQLTQSPSSLSASVGDRVTITCRASQGISSALVWYQQKPGKAPKLLIYDALSLESGVPSRFSGSGSGTDFTLTISSLQPEDFATYYCQQFNDYFTFGPGTKVDIKR

SEQ ID NO: 1714 - protein, 447 aa, synthetic construct; identical to SEQ ID NO: 1
  source 1..447: note = UGX393 heavy chain sequence

SEQ ID NO: 1715 - protein, 213 aa, synthetic construct
  source 1..213: note = UGX393 light chain sequence
AIQLTQSPSSLSASVGDRVTITCRASQGISSALVWYQQKPGKAPKLLIYDAKSLESGVPSRFSGSGSGTDFTLTISSLQPEDFATYYCQQFNDYFTFGPGTKVDIKRTVAAPSVFIFPPSDEQLKSGTASVVCLLNNFYPREAKVQWKVDNALQSGNSQESVTEQDSKDSTYSLSSTLTLSKADYEKHKVYACEVTHQGLSSPVTKSFNRGEC

SEQ ID NO: 1716 - protein, 117 aa, synthetic construct; identical to SEQ ID NO: 3
  source 1..117: note = UGX393 heavy chain variable region sequence

SEQ ID NO: 1717 - protein, 107 aa, synthetic construct
  source 1..107: note = UGX393 light chain variable region sequence
AIQLTQSPSSLSASVGDRVTITCRASQGISSALVWYQQKPGKAPKLLIYDAKSLESGVPSRFSGSGSGTDFTLTISSLQPEDFATYYCQQFNDYFTFGPGTKVDIKR

SEQ ID NO: 1718 - protein, 447 aa, synthetic construct; identical to SEQ ID NO: 1
  source 1..447: note = UGX394 heavy chain sequence

SEQ ID NO: 1719 - protein, 213 aa, synthetic construct
  source 1..213: note = UGX394 light chain sequence
AIQLTQSPSSLSASVGDRVTITCRASQGISSALVWYQQKPGKAPKLLIYDAMSLESGVPSRFSGSGSGTDFTLTISSLQPEDFATYYCQQFNDYFTFGPGTKVDIKRTVAAPSVFIFPPSDEQLKSGTASVVCLLNNFYPREAKVQWKVDNALQSGNSQESVTEQDSKDSTYSLSSTLTLSKADYEKHKVYACEVTHQGLSSPVTKSFNRGEC

SEQ ID NO: 1720 - protein, 117 aa, synthetic construct; identical to SEQ ID NO: 3
  source 1..117: note = UGX394 heavy chain variable region sequence

SEQ ID NO: 1721 - protein, 107 aa, synthetic construct
  source 1..107: note = UGX394 light chain variable region sequence
AIQLTQSPSSLSASVGDRVTITCRASQGISSALVWYQQKPGKAPKLLIYDAMSLESGVPSRFSGSGSGTDFTLTISSLQPEDFATYYCQQFNDYFTFGPGTKVDIKR

SEQ ID NO: 1722 - protein, 447 aa, synthetic construct; identical to SEQ ID NO: 1
  source 1..447: note = UGX395 heavy chain sequence

SEQ ID NO: 1723 - protein, 213 aa, synthetic construct
  source 1..213: note = UGX395 light chain sequence
AIQLTQSPSSLSASVGDRVTITCRASQGISSALVWYQQKPGKAPKLLIYDAPSLESGVPSRFSGSGSGTDFTLTISSLQPEDFATYYCQQFNDYFTFGPGTKVDIKRTVAAPSVFIFPPSDEQLKSGTASVVCLLNNFYPREAKVQWKVDNALQSGNSQESVTEQDSKDSTYSLSSTLTLSKADYEKHKVYACEVTHQGLSSPVTKSFNRGEC

SEQ ID NO: 1724 - protein, 117 aa, synthetic construct; identical to SEQ ID NO: 3
  source 1..117: note = UGX395 heavy chain variable region sequence

SEQ ID NO: 1725 - protein, 107 aa, synthetic construct
  source 1..107: note = UGX395 light chain variable region sequence
AIQLTQSPSSLSASVGDRVTITCRASQGISSALVWYQQKPGKAPKLLIYDAPSLESGVPSRFSGSGSGTDFTLTISSLQPEDFATYYCQQFNDYFTFGPGTKVDIKR

SEQ ID NO: 1726 - protein, 447 aa, synthetic construct; identical to SEQ ID NO: 1
  source 1..447: note = UGX396 heavy chain sequence

SEQ ID NO: 1727 - protein, 213 aa, synthetic construct
  source 1..213: note = UGX396 light chain sequence
AIQLTQSPSSLSASVGDRVTITCRASQGISSALVWYQQKPGKAPKLLIYDAWSLESGVPSRFSGSGSGTDFTLTISSLQPEDFATYYCQQFNDYFTFGPGTKVDIKRTVAAPSVFIFPPSDEQLKSGTASVVCLLNNFYPREAKVQWKVDNALQSGNSQESVTEQDSKDSTYSLSSTLTLSKADYEKHKVYACEVTHQGLSSPVTKSFNRGEC

SEQ ID NO: 1728 - protein, 117 aa, synthetic construct; identical to SEQ ID NO: 3
  source 1..117: note = UGX396 heavy chain variable region sequence

SEQ ID NO: 1729 - protein, 107 aa, synthetic construct
  source 1..107: note = UGX396 light chain variable region sequence
AIQLTQSPSSLSASVGDRVTITCRASQGISSALVWYQQKPGKAPKLLIYDAWSLESGVPSRFSGSGSGTDFTLTISSLQPEDFATYYCQQFNDYFTFGPGTKVDIKR

SEQ ID NO: 1730 - protein, 447 aa, synthetic construct; identical to SEQ ID NO: 1
  source 1..447: note = UGX397 heavy chain sequence

SEQ ID NO: 1731 - protein, 213 aa, synthetic construct
  source 1..213: note = UGX397 light chain sequence
AIQLTQSPSSLSASVGDRVTITCRASQGISSALVWYQQKPGKAPKLLIYDAVSLESGVPSRFSGSGSGTDFTLTISSLQPEDFATYYCQQFNDYFTFGPGTKVDIKRTVAAPSVFIFPPSDEQLKSGTASVVCLLNNFYPREAKVQWKVDNALQSGNSQESVTEQDSKDSTYSLSSTLTLSKADYEKHKVYACEVTHQGLSSPVTKSFNRGEC

SEQ ID NO: 1732 - protein, 117 aa, synthetic construct; identical to SEQ ID NO: 3
  source 1..117: note = UGX397 heavy chain variable region sequence

SEQ ID NO: 1733 - protein, 107 aa, synthetic construct
  source 1..107: note = UGX397 light chain variable region sequence
AIQLTQSPSSLSASVGDRVTITCRASQGISSALVWYQQKPGKAPKLLIYDAVSLESGVPSRFSGSGSGTDFTLTISSLQPEDFATYYCQQFNDYFTFGPGTKVDIKR

SEQ ID NO: 1734 - protein, 447 aa, synthetic construct
  source 1..447: note = UGX398 heavy chain sequence
QVQLVQSGAEVKKPGASVKVSCKASGYTFTNHYMHWVRQAPGQGLEWMGIINPISGSTENAQKFQGRVTMTRDTSTSTVYMELSSLRSEDTAVYYCARDIIDAFDFWGQGTMVTVSSASTKGPSVFPLAPSSKSTSGGTAALGCLVKDYFPEPVTVSWNSGALTSGVHTFPAVLQSSGLYSLSSVVTVPSSSLGTQTYICNVNHKPSNTKVDKKVEPKSCDKTHTCPPCPAPELLGGPSVFLFPPKPKDTLMISRTPEVTCVVVDVSHEDPEVKFNWYVDGVEVHNAKTKPREEQYNSTYRVVSVLTVLHQDWLNGKEYKCKVSNKALPAPIEKTISKAKGQPREPQVYTLPPSRDELTKNQVSLTCLVKGFYPSDIAVEWESNGQPENNYKTTPPVLDSDGSFFLYSKLTVDKSRWQQGNVFSCSVMHEALHNHYTQKSLSLSPGK

SEQ ID NO: 1735 - protein, 213 aa, synthetic construct; identical to SEQ ID NO: 2
  source 1..213: note = UGX398 light chain sequence

SEQ ID NO: 1736 - protein, 117 aa, synthetic construct
  source 1..117: note = UGX398 heavy chain variable region sequence
QVQLVQSGAEVKKPGASVKVSCKASGYTFTNHYMHWVRQAPGQGLEWMGIINPISGSTENAQKFQGRVTMTRDTSTSTVYMELSSLRSEDTAVYYCARDIIDAFDFWGQGTMVTVSS

SEQ ID NO: 1737 - protein, 107 aa, synthetic construct; identical to SEQ ID NO: 4
  source 1..107: note = UGX398 light chain variable region sequence

SEQ ID NO: 1738 - protein, 447 aa, synthetic construct
  source 1..447: note = UGX399 heavy chain sequence
QVQLVQSGAEVKKPGASVKVSCKASGYTFTNHYMHWVRQAPGQGLEWMGIINPISGSTDNAQKFQGRVTMTRDTSTSTVYMELSSLRSEDTAVYYCARDILDAFDFWGQGTMVTVSSASTKGPSVFPLAPSSKSTSGGTAALGCLVKDYFPEPVTVSWNSGALTSGVHTFPAVLQSSGLYSLSSVVTVPSSSLGTQTYICNVNHKPSNTKVDKKVEPKSCDKTHTCPPCPAPELLGGPSVFLFPPKPKDTLMISRTPEVTCVVVDVSHEDPEVKFNWYVDGVEVHNAKTKPREEQYNSTYRVVSVLTVLHQDWLNGKEYKCKVSNKALPAPIEKTISKAKGQPREPQVYTLPPSRDELTKNQVSLTCLVKGFYPSDIAVEWESNGQPENNYKTTPPVLDSDGSFFLYSKLTVDKSRWQQGNVFSCSVMHEALHNHYTQKSLSLSPGK

SEQ ID NO: 1739 - protein, 213 aa, synthetic construct; identical to SEQ ID NO: 2
  source 1..213: note = UGX399 light chain sequence

SEQ ID NO: 1740 - protein, 117 aa, synthetic construct
  source 1..117: note = UGX399 heavy chain variable region sequence
QVQLVQSGAEVKKPGASVKVSCKASGYTFTNHYMHWVRQAPGQGLEWMGIINPISGSTDNAQKFQGRVTMTRDTSTSTVYMELSSLRSEDTAVYYCARDILDAFDFWGQGTMVTVSS

SEQ ID NO: 1741 - protein, 107 aa, synthetic construct; identical to SEQ ID NO: 4
  source 1..107: note = UGX399 light chain variable region sequence

SEQ ID NO: 1742 - protein, 447 aa, synthetic construct
  source 1..447: note = UGX400 heavy chain sequence
QVQLVQSGAEVKKPGASVKVSCKASGYTFTNHYMHWVRQAPGQGLEWMGIINPISGSTQNAQKFQGRVTMTRDTSTSTVYMELSSLRSEDTAVYYCARDIIDAFDFWGQGTMVTVSSASTKGPSVFPLAPSSKSTSGGTAALGCLVKDYFPEPVTVSWNSGALTSGVHTFPAVLQSSGLYSLSSVVTVPSSSLGTQTYICNVNHKPSNTKVDKKVEPKSCDKTHTCPPCPAPELLGGPSVFLFPPKPKDTLMISRTPEVTCVVVDVSHEDPEVKFNWYVDGVEVHNAKTKPREEQYNSTYRVVSVLTVLHQDWLNGKEYKCKVSNKALPAPIEKTISKAKGQPREPQVYTLPPSRDELTKNQVSLTCLVKGFYPSDIAVEWESNGQPENNYKTTPPVLDSDGSFFLYSKLTVDKSRWQQGNVFSCSVMHEALHNHYTQKSLSLSPGK

SEQ ID NO: 1743 - protein, 213 aa, synthetic construct; identical to SEQ ID NO: 2
  source 1..213: note = UGX400 light chain sequence

SEQ ID NO: 1744 - protein, 117 aa, synthetic construct
  source 1..117: note = UGX400 heavy chain variable region sequence
QVQLVQSGAEVKKPGASVKVSCKASGYTFTNHYMHWVRQAPGQGLEWMGIINPISGSTQNAQKFQGRVTMTRDTSTSTVYMELSSLRSEDTAVYYCARDIIDAFDFWGQGTMVTVSS

SEQ ID NO: 1745 - protein, 107 aa, synthetic construct; identical to SEQ ID NO: 4
  source 1..107: note = UGX400 light chain variable region sequence

SEQ ID NO: 1746 - protein, 447 aa, synthetic construct
  source 1..447: note = UGX401 heavy chain sequence
QVQLVQSGAEVKKPGASVKVSCKASGYTFTNHYMHWVRQAPGQGLEWMGIINPISGSTDNAQKFQGRVTMTRDTSTSTVYMELSSLRSEDTAVYYCARDISDAFDFWGQGTMVTVSSASTKGPSVFPLAPSSKSTSGGTAALGCLVKDYFPEPVTVSWNSGALTSGVHTFPAVLQSSGLYSLSSVVTVPSSSLGTQTYICNVNHKPSNTKVDKKVEPKSCDKTHTCPPCPAPELLGGPSVFLFPPKPKDTLMISRTPEVTCVVVDVSHEDPEVKFNWYVDGVEVHNAKTKPREEQYNSTYRVVSVLTVLHQDWLNGKEYKCKVSNKALPAPIEKTISKAKGQPREPQVYTLPPSRDELTKNQVSLTCLVKGFYPSDIAVEWESNGQPENNYKTTPPVLDSDGSFFLYSKLTVDKSRWQQGNVFSCSVMHEALHNHYTQKSLSLSPGK

SEQ ID NO: 1747 - protein, 213 aa, synthetic construct; identical to SEQ ID NO: 2
  source 1..213: note = UGX401 light chain sequence

SEQ ID NO: 1748 - protein, 117 aa, synthetic construct
  source 1..117: note = UGX401 heavy chain variable region sequence
QVQLVQSGAEVKKPGASVKVSCKASGYTFTNHYMHWVRQAPGQGLEWMGIINPISGSTDNAQKFQGRVTMTRDTSTSTVYMELSSLRSEDTAVYYCARDISDAFDFWGQGTMVTVSS

SEQ ID NO: 1749 - protein, 107 aa, synthetic construct; identical to SEQ ID NO: 4
  source 1..107: note = UGX401 light chain variable region sequence

SEQ ID NO: 1750 - protein, 447 aa, synthetic construct
  source 1..447: note = UGX402 heavy chain sequence
QVQLVQSGAEVKKPGASVKVSCKASGYTFTNHYMHWVRQAPGQGLEWMGIINPISGSTENAQKFQGRVTMTRDTSTSTVYMELSSLRSEDTAVYYCARDISDAFDFWGQGTMVTVSSASTKGPSVFPLAPSSKSTSGGTAALGCLVKDYFPEPVTVSWNSGALTSGVHTFPAVLQSSGLYSLSSVVTVPSSSLGTQTYICNVNHKPSNTKVDKKVEPKSCDKTHTCPPCPAPELLGGPSVFLFPPKPKDTLMISRTPEVTCVVVDVSHEDPEVKFNWYVDGVEVHNAKTKPREEQYNSTYRVVSVLTVLHQDWLNGKEYKCKVSNKALPAPIEKTISKAKGQPREPQVYTLPPSRDELTKNQVSLTCLVKGFYPSDIAVEWESNGQPENNYKTTPPVLDSDGSFFLYSKLTVDKSRWQQGNVFSCSVMHEALHNHYTQKSLSLSPGK

SEQ ID NO: 1751 - protein, 213 aa, synthetic construct; identical to SEQ ID NO: 2
  source 1..213: note = UGX402 light chain sequence

SEQ ID NO: 1752 - protein, 117 aa, synthetic construct
  source 1..117: note = UGX402 heavy chain variable region sequence
QVQLVQSGAEVKKPGASVKVSCKASGYTFTNHYMHWVRQAPGQGLEWMGIINPISGSTENAQKFQGRVTMTRDTSTSTVYMELSSLRSEDTAVYYCARDISDAFDFWGQGTMVTVSS

SEQ ID NO: 1753 - protein, 107 aa, synthetic construct; identical to SEQ ID NO: 4
  source 1..107: note = UGX402 light chain variable region sequence

SEQ ID NO: 1754 - protein, 447 aa, synthetic construct
  source 1..447: note = UGX403 heavy chain sequence
QVQLVQSGAEVKKPGASVKVSCKASGYTFTNHYMHWVRQAPGQGLEWMGIINPISGSTSNAQKFQGRVTMTRDTSTSTVYMELSSLRSEDTAVYYCARDIADAFDFWGQGTMVTVSSASTKGPSVFPLAPSSKSTSGGTAALGCLVKDYFPEPVTVSWNSGALTSGVHTFPAVLQSSGLYSLSSVVTVPSSSLGTQTYICNVNHKPSNTKVDKKVEPKSCDKTHTCPPCPAPELLGGPSVFLFPPKPKDTLMISRTPEVTCVVVDVSHEDPEVKFNWYVDGVEVHNAKTKPREEQYNSTYRVVSVLTVLHQDWLNGKEYKCKVSNKALPAPIEKTISKAKGQPREPQVYTLPPSRDELTKNQVSLTCLVKGFYPSDIAVEWESNGQPENNYKTTPPVLDSDGSFFLYSKLTVDKSRWQQGNVFSCSVMHEALHNHYTQKSLSLSPGK

SEQ ID NO: 1755 - protein, 213 aa, synthetic construct; identical to SEQ ID NO: 2
  source 1..213: note = UGX403 light chain sequence

SEQ ID NO: 1756 - protein, 117 aa, synthetic construct
  source 1..117: note = UGX403 heavy chain variable region sequence
QVQLVQSGAEVKKPGASVKVSCKASGYTFTNHYMHWVRQAPGQGLEWMGIINPISGSTSNAQKFQGRVTMTRDTSTSTVYMELSSLRSEDTAVYYCARDIADAFDFWGQGTMVTVSS

SEQ ID NO: 1757 - protein, 107 aa, synthetic construct; identical to SEQ ID NO: 4
  source 1..107: note = UGX403 light chain variable region sequence

SEQ ID NO: 1758 - protein, 447 aa, synthetic construct
  source 1..447: note = UGX405 heavy chain sequence
QVQLVQSGAEVKKPGASVKVSCKASGYTFTNHYMHWVRQAPGQGLEWMGIINPISGSTSNAQKFQGRVTMTRDTSTSTVYMELSSLRSEDTAVYYCARDINDAFDFWGQGTMVTVSSASTKGPSVFPLAPSSKSTSGGTAALGCLVKDYFPEPVTVSWNSGALTSGVHTFPAVLQSSGLYSLSSVVTVPSSSLGTQTYICNVNHKPSNTKVDKKVEPKSCDKTHTCPPCPAPELLGGPSVFLFPPKPKDTLMISRTPEVTCVVVDVSHEDPEVKFNWYVDGVEVHNAKTKPREEQYNSTYRVVSVLTVLHQDWLNGKEYKCKVSNKALPAPIEKTISKAKGQPREPQVYTLPPSRDELTKNQVSLTCLVKGFYPSDIAVEWESNGQPENNYKTTPPVLDSDGSFFLYSKLTVDKSRWQQGNVFSCSVMHEALHNHYTQKSLSLSPGK

SEQ ID NO: 1759 - protein, 213 aa, synthetic construct; identical to SEQ ID NO: 2
  source 1..213: note = UGX405 light chain sequence

SEQ ID NO: 1760 - protein, 117 aa, synthetic construct
  source 1..117: note = UGX405 heavy chain variable region sequence
QVQLVQSGAEVKKPGASVKVSCKASGYTFTNHYMHWVRQAPGQGLEWMGIINPISGSTSNAQKFQGRVTMTRDTSTSTVYMELSSLRSEDTAVYYCARDINDAFDFWGQGTMVTVSS

SEQ ID NO: 1761 - protein, 107 aa, synthetic construct; identical to SEQ ID NO: 4
  source 1..107: note = UGX405 light chain variable region sequence

SEQ ID NO: 1762 - protein, 447 aa, synthetic construct
  source 1..447: note = UGX406 heavy chain sequence
QVQLVQSGAEVKKPGASVKVSCKASGYTFTNHYMHWVRQAPGQGLEWMGIINPISGSTSNAQKFQGRVTMTRDTSTSTVYMELSSLRSEDTAVYYCARDIDDAFDFWGQGTMVTVSSASTKGPSVFPLAPSSKSTSGGTAALGCLVKDYFPEPVTVSWNSGALTSGVHTFPAVLQSSGLYSLSSVVTVPSSSLGTQTYICNVNHKPSNTKVDKKVEPKSCDKTHTCPPCPAPELLGGPSVFLFPPKPKDTLMISRTPEVTCVVVDVSHEDPEVKFNWYVDGVEVHNAKTKPREEQYNSTYRVVSVLTVLHQDWLNGKEYKCKVSNKALPAPIEKTISKAKGQPREPQVYTLPPSRDELTKNQVSLTCLVKGFYPSDIAVEWESNGQPENNYKTTPPVLDSDGSFFLYSKLTVDKSRWQQGNVFSCSVMHEALHNHYTQKSLSLSPGK

SEQ ID NO: 1763 - protein, 213 aa, synthetic construct; identical to SEQ ID NO: 2
  source 1..213: note = UGX406 light chain sequence

SEQ ID NO: 1764 - protein, 117 aa, synthetic construct
  source 1..117: note = UGX406 heavy chain variable region sequence
QVQLVQSGAEVKKPGASVKVSCKASGYTFTNHYMHWVRQAPGQGLEWMGIINPISGSTSNAQKFQGRVTMTRDTSTSTVYMELSSLRSEDTAVYYCARDIDDAFDFWGQGTMVTVSS

SEQ ID NO: 1765 - protein, 107 aa, synthetic construct; identical to SEQ ID NO: 4
  source 1..107: note = UGX406 light chain variable region sequence

SEQ ID NO: 1766 - protein, 447 aa, synthetic construct
  source 1..447: note = UGX409 heavy chain sequence
QVQLVQSGAEVKKPGASVKVSCKASGYTFTNHYMHWVRQAPGQGLEWMGIINPISGSTSNAQKFQGRVTMTRDTSTSTVYMELSSLRSEDTAVYYCARDIGDAFDFWGQGTMVTVSSASTKGPSVFPLAPSSKSTSGGTAALGCLVKDYFPEPVTVSWNSGALTSGVHTFPAVLQSSGLYSLSSVVTVPSSSLGTQTYICNVNHKPSNTKVDKKVEPKSCDKTHTCPPCPAPELLGGPSVFLFPPKPKDTLMISRTPEVTCVVVDVSHEDPEVKFNWYVDGVEVHNAKTKPREEQYNSTYRVVSVLTVLHQDWLNGKEYKCKVSNKALPAPIEKTISKAKGQPREPQVYTLPPSRDELTKNQVSLTCLVKGFYPSDIAVEWESNGQPENNYKTTPPVLDSDGSFFLYSKLTVDKSRWQQGNVFSCSVMHEALHNHYTQKSLSLSPGK

SEQ ID NO: 1767 - protein, 213 aa, synthetic construct; identical to SEQ ID NO: 2
  source 1..213: note = UGX409 light chain sequence

SEQ ID NO: 1768 - protein, 117 aa, synthetic construct
  source 1..117: note = UGX409 heavy chain variable region sequence
QVQLVQSGAEVKKPGASVKVSCKASGYTFTNHYMHWVRQAPGQGLEWMGIINPISGSTSNAQKFQGRVTMTRDTSTSTVYMELSSLRSEDTAVYYCARDIGDAFDFWGQGTMVTVSS

SEQ ID NO: 1769 - protein, 107 aa, synthetic construct; identical to SEQ ID NO: 4
  source 1..107: note = UGX409 light chain variable region sequence

SEQ ID NO: 1770 - protein, 447 aa, synthetic construct
  source 1..447: note = UGX410 heavy chain sequence
QVQLVQSGAEVKKPGASVKVSCKASGYTFTNHYMHWVRQAPGQGLEWMGIINPISGSTSNAQKFQGRVTMTRDTSTSTVYMELSSLRSEDTAVYYCARDIHDAFDFWGQGTMVTVSSASTKGPSVFPLAPSSKSTSGGTAALGCLVKDYFPEPVTVSWNSGALTSGVHTFPAVLQSSGLYSLSSVVTVPSSSLGTQTYICNVNHKPSNTKVDKKVEPKSCDKTHTCPPCPAPELLGGPSVFLFPPKPKDTLMISRTPEVTCVVVDVSHEDPEVKFNWYVDGVEVHNAKTKPREEQYNSTYRVVSVLTVLHQDWLNGKEYKCKVSNKALPAPIEKTISKAKGQPREPQVYTLPPSRDELTKNQVSLTCLVKGFYPSDIAVEWESNGQPENNYKTTPPVLDSDGSFFLYSKLTVDKSRWQQGNVFSCSVMHEALHNHYTQKSLSLSPGK

SEQ ID NO: 1771 - protein, 213 aa, synthetic construct; identical to SEQ ID NO: 2
  source 1..213: note = UGX410 light chain sequence

SEQ ID NO: 1772 - protein, 117 aa, synthetic construct
  source 1..117: note = UGX410 heavy chain variable region sequence
QVQLVQSGAEVKKPGASVKVSCKASGYTFTNHYMHWVRQAPGQGLEWMGIINPISGSTSNAQKFQGRVTMTRDTSTSTVYMELSSLRSEDTAVYYCARDIHDAFDFWGQGTMVTVSS

SEQ ID NO: 1773 - protein, 107 aa, synthetic construct; identical to SEQ ID NO: 4
  source 1..107: note = UGX410 light chain variable region sequence

SEQ ID NO: 1774 - protein, 447 aa, synthetic construct
  source 1..447: note = UGX411 heavy chain sequence
QVQLVQSGAEVKKPGASVKVSCKASGYTFTNHYMHWVRQAPGQGLEWMGIINPISGSTSNAQKFQGRVTMTRDTSTSTVYMELSSLRSEDTAVYYCARDIKDAFDFWGQGTMVTVSSASTKGPSVFPLAPSSKSTSGGTAALGCLVKDYFPEPVTVSWNSGALTSGVHTFPAVLQSSGLYSLSSVVTVPSSSLGTQTYICNVNHKPSNTKVDKKVEPKSCDKTHTCPPCPAPELLGGPSVFLFPPKPKDTLMISRTPEVTCVVVDVSHEDPEVKFNWYVDGVEVHNAKTKPREEQYNSTYRVVSVLTVLHQDWLNGKEYKCKVSNKALPAPIEKTISKAKGQPREPQVYTLPPSRDELTKNQVSLTCLVKGFYPSDIAVEWESNGQPENNYKTTPPVLDSDGSFFLYSKLTVDKSRWQQGNVFSCSVMHEALHNHYTQKSLSLSPGK

SEQ ID NO: 1775 - protein, 213 aa, synthetic construct; identical to SEQ ID NO: 2
  source 1..213: note = UGX411 light chain sequence

SEQ ID NO: 1776 - protein, 117 aa, synthetic construct
  source 1..117: note = UGX411 heavy chain variable region sequence
QVQLVQSGAEVKKPGASVKVSCKASGYTFTNHYMHWVRQAPGQGLEWMGIINPISGSTSNAQKFQGRVTMTRDTSTSTVYMELSSLRSEDTAVYYCARDIKDAFDFWGQGTMVTVSS

SEQ ID NO: 1777 - protein, 107 aa, synthetic construct; identical to SEQ ID NO: 4
  source 1..107: note = UGX411 light chain variable region sequence

SEQ ID NO: 1778 - protein, 447 aa, synthetic construct
  source 1..447: note = UGX412 heavy chain sequence
QVQLVQSGAEVKKPGASVKVSCKASGYTFTNHYMHWVRQAPGQGLEWMGIINPISGSTSNAQKFQGRVTMTRDTSTSTVYMELSSLRSEDTAVYYCARDIMDAFDFWGQGTMVTVSSASTKGPSVFPLAPSSKSTSGGTAALGCLVKDYFPEPVTVSWNSGALTSGVHTFPAVLQSSGLYSLSSVVTVPSSSLGTQTYICNVNHKPSNTKVDKKVEPKSCDKTHTCPPCPAPELLGGPSVFLFPPKPKDTLMISRTPEVTCVVVDVSHEDPEVKFNWYVDGVEVHNAKTKPREEQYNSTYRVVSVLTVLHQDWLNGKEYKCKVSNKALPAPIEKTISKAKGQPREPQVYTLPPSRDELTKNQVSLTCLVKGFYPSDIAVEWESNGQPENNYKTTPPVLDSDGSFFLYSKLTVDKSRWQQGNVFSCSVMHEALHNHYTQKSLSLSPGK

SEQ ID NO: 1779 - protein, 213 aa, synthetic construct; identical to SEQ ID NO: 2
  source 1..213: note = UGX412 light chain sequence

SEQ ID NO: 1780 - protein, 117 aa, synthetic construct
  source 1..117: note = UGX412 heavy chain variable region sequence
QVQLVQSGAEVKKPGASVKVSCKASGYTFTNHYMHWVRQAPGQGLEWMGIINPISGSTSNAQKFQGRVTMTRDTSTSTVYMELSSLRSEDTAVYYCARDIMDAFDFWGQGTMVTVSS

SEQ ID NO: 1781 - protein, 107 aa, synthetic construct; identical to SEQ ID NO: 4
  source 1..107: note = UGX412 light chain variable region sequence

SEQ ID NO: 1782 - protein, 447 aa, synthetic construct
  source 1..447: note = UGX413 heavy chain sequence
QVQLVQSGAEVKKPGASVKVSCKASGYTFTNHYMHWVRQAPGQGLEWMGIINPISGSTSNAQKFQGRVTMTRDTSTSTVYMELSSLRSEDTAVYYCARDIPDAFDFWGQGTMVTVSSASTKGPSVFPLAPSSKSTSGGTAALGCLVKDYFPEPVTVSWNSGALTSGVHTFPAVLQSSGLYSLSSVVTVPSSSLGTQTYICNVNHKPSNTKVDKKVEPKSCDKTHTCPPCPAPELLGGPSVFLFPPKPKDTLMISRTPEVTCVVVDVSHEDPEVKFNWYVDGVEVHNAKTKPREEQYNSTYRVVSVLTVLHQDWLNGKEYKCKVSNKALPAPIEKTISKAKGQPREPQVYTLPPSRDELTKNQVSLTCLVKGFYPSDIAVEWESNGQPENNYKTTPPVLDSDGSFFLYSKLTVDKSRWQQGNVFSCSVMHEALHNHYTQKSLSLSPGK

SEQ ID NO: 1783 - protein, 213 aa, synthetic construct; identical to SEQ ID NO: 2
  source 1..213: note = UGX413 light chain sequence

SEQ ID NO: 1784 - protein, 117 aa, synthetic construct
  source 1..117: note = UGX413 heavy chain variable region sequence
QVQLVQSGAEVKKPGASVKVSCKASGYTFTNHYMHWVRQAPGQGLEWMGIINPISGSTSNAQKFQGRVTMTRDTSTSTVYMELSSLRSEDTAVYYCARDIPDAFDFWGQGTMVTVSS

SEQ ID NO: 1785 - protein, 107 aa, synthetic construct; identical to SEQ ID NO: 4
  source 1..107: note = UGX413 light chain variable region sequence

SEQ ID NO: 1786 - protein, 447 aa, synthetic construct
  source 1..447: note = UGX414 heavy chain sequence
QVQLVQSGAEVKKPGASVKVSCKASGYTFTNHYMHWVRQAPGQGLEWMGIINPISGSTSNAQKFQGRVTMTRDTSTSTVYMELSSLRSEDTAVYYCARDISDAFDFWGQGTMVTVSSASTKGPSVFPLAPSSKSTSGGTAALGCLVKDYFPEPVTVSWNSGALTSGVHTFPAVLQSSGLYSLSSVVTVPSSSLGTQTYICNVNHKPSNTKVDKKVEPKSCDKTHTCPPCPAPELLGGPSVFLFPPKPKDTLMISRTPEVTCVVVDVSHEDPEVKFNWYVDGVEVHNAKTKPREEQYNSTYRVVSVLTVLHQDWLNGKEYKCKVSNKALPAPIEKTISKAKGQPREPQVYTLPPSRDELTKNQVSLTCLVKGFYPSDIAVEWESNGQPENNYKTTPPVLDSDGSFFLYSKLTVDKSRWQQGNVFSCSVMHEALHNHYTQKSLSLSPGK

SEQ ID NO: 1787 - protein, 213 aa, synthetic construct; identical to SEQ ID NO: 2
  source 1..213: note = UGX414 light chain sequence

SEQ ID NO: 1788 - protein, 117 aa, synthetic construct
  source 1..117: note = UGX414 heavy chain variable region sequence
QVQLVQSGAEVKKPGASVKVSCKASGYTFTNHYMHWVRQAPGQGLEWMGIINPISGSTSNAQKFQGRVTMTRDTSTSTVYMELSSLRSEDTAVYYCARDISDAFDFWGQGTMVTVSS

SEQ ID NO: 1789 - protein, 107 aa, synthetic construct; identical to SEQ ID NO: 4
  source 1..107: note = UGX414 light chain variable region sequence

SEQ ID NO: 1790 - protein, 447 aa, synthetic construct
  source 1..447: note = UGX415 heavy chain sequence
QVQLVQSGAEVKKPGASVKVSCKASGYTFTNHYMHWVRQAPGQGLEWMGIINPISGSTSNAQKFQGRVTMTRDTSTSTVYMELSSLRSEDTAVYYCARDIWDAFDFWGQGTMVTVSSASTKGPSVFPLAPSSKSTSGGTAALGCLVKDYFPEPVTVSWNSGALTSGVHTFPAVLQSSGLYSLSSVVTVPSSSLGTQTYICNVNHKPSNTKVDKKVEPKSCDKTHTCPPCPAPELLGGPSVFLFPPKPKDTLMISRTPEVTCVVVDVSHEDPEVKFNWYVDGVEVHNAKTKPREEQYNSTYRVVSVLTVLHQDWLNGKEYKCKVSNKALPAPIEKTISKAKGQPREPQVYTLPPSRDELTKNQVSLTCLVKGFYPSDIAVEWESNGQPENNYKTTPPVLDSDGSFFLYSKLTVDKSRWQQGNVFSCSVMHEALHNHYTQKSLSLSPGK

SEQ ID NO: 1791 - protein, 213 aa, synthetic construct; identical to SEQ ID NO: 2
  source 1..213: note = UGX415 light chain sequence

SEQ ID NO: 1792 - protein, 117 aa, synthetic construct
  source 1..117: note = UGX415 heavy chain variable region sequence
QVQLVQSGAEVKKPGASVKVSCKASGYTFTNHYMHWVRQAPGQGLEWMGIINPISGSTSNAQKFQGRVTMTRDTSTSTVYMELSSLRSEDTAVYYCARDIWDAFDFWGQGTMVTVSS

SEQ ID NO: 1793 - protein, 107 aa, synthetic construct; identical to SEQ ID NO: 4
  source 1..107: note = UGX415 light chain variable region sequence

SEQ ID NO: 1794 - protein, 447 aa, synthetic construct
  source 1..447: note = UGX416 heavy chain sequence
QVQLVQSGAEVKKPGASVKVSCKASGYTFTNHYMHWVRQAPGQGLEWMGIINPYSGSTSNAQKFQGRVTMTRDTSTSTVYMELSSLRSEDTAVYYCARDIVDSFDFWGQGTMVTVSSASTKGPSVFPLAPSSKSTSGGTAALGCLVKDYFPEPVTVSWNSGALTSGVHTFPAVLQSSGLYSLSSVVTVPSSSLGTQTYICNVNHKPSNTKVDKKVEPKSCDKTHTCPPCPAPELLGGPSVFLFPPKPKDTLMISRTPEVTCVVVDVSHEDPEVKFNWYVDGVEVHNAKTKPREEQYNSTYRVVSVLTVLHQDWLNGKEYKCKVSNKALPAPIEKTISKAKGQPREPQVYTLPPSRDELTKNQVSLTCLVKGFYPSDIAVEWESNGQPENNYKTTPPVLDSDGSFFLYSKLTVDKSRWQQGNVFSCSVMHEALHNHYTQKSLSLSPGK

SEQ ID NO: 1795 - protein, 213 aa, synthetic construct; identical to SEQ ID NO: 2
  source 1..213: note = UGX416 light chain sequence

SEQ ID NO: 1796 - protein, 117 aa, synthetic construct
  source 1..117: note = UGX416 heavy chain variable region sequence
QVQLVQSGAEVKKPGASVKVSCKASGYTFTNHYMHWVRQAPGQGLEWMGIINPYSGSTSNAQKFQGRVTMTRDTSTSTVYMELSSLRSEDTAVYYCARDIVDSFDFWGQGTMVTVSS

SEQ ID NO: 1797 - protein, 107 aa, synthetic construct; identical to SEQ ID NO: 4
  source 1..107: note = UGX416 light chain variable region sequence

SEQ ID NO: 1798 - protein, 447 aa, synthetic construct
  source 1..447: note = UGX417 heavy chain sequence
QVQLVQSGAEVKKPGASVKVSCKASGYTFTNHYMHWVRQAPGQGLEWMGIINPFSGSTSNAQKFQGRVTMTRDTSTSTVYMELSSLRSEDTAVYYCARDIVDSFDFWGQGTMVTVSSASTKGPSVFPLAPSSKSTSGGTAALGCLVKDYFPEPVTVSWNSGALTSGVHTFPAVLQSSGLYSLSSVVTVPSSSLGTQTYICNVNHKPSNTKVDKKVEPKSCDKTHTCPPCPAPELLGGPSVFLFPPKPKDTLMISRTPEVTCVVVDVSHEDPEVKFNWYVDGVEVHNAKTKPREEQYNSTYRVVSVLTVLHQDWLNGKEYKCKVSNKALPAPIEKTISKAKGQPREPQVYTLPPSRDELTKNQVSLTCLVKGFYPSDIAVEWESNGQPENNYKTTPPVLDSDGSFFLYSKLTVDKSRWQQGNVFSCSVMHEALHNHYTQKSLSLSPGK

SEQ ID NO: 1799 - protein, 213 aa, synthetic construct; identical to SEQ ID NO: 2
  source 1..213: note = UGX417 light chain sequence

SEQ ID NO: 1800 - protein, 117 aa, synthetic construct
  source 1..117: note = UGX417 heavy chain variable region sequence
QVQLVQSGAEVKKPGASVKVSCKASGYTFTNHYMHWVRQAPGQGLEWMGIINPFSGSTSNAQKFQGRVTMTRDTSTSTVYMELSSLRSEDTAVYYCARDIVDSFDFWGQGTMVTVSS

SEQ ID NO: 1801 - protein, 107 aa, synthetic construct; identical to SEQ ID NO: 4
  source 1..107: note = UGX417 light chain variable region sequence

SEQ ID NO: 1802 - protein, 447 aa, synthetic construct; identical to SEQ ID NO: 1250
  source 1..447: note = UGX418 heavy chain sequence

SEQ ID NO: 1803 - protein, 213 aa, synthetic construct; identical to SEQ ID NO: 1155
  source 1..213: note = UGX418 light chain sequence

SEQ ID NO: 1804 - protein, 117 aa, synthetic construct; identical to SEQ ID NO: 245
  source 1..117: note = UGX418 heavy chain variable region sequence

SEQ ID NO: 1805 - protein, 107 aa, synthetic construct; identical to SEQ ID NO: 340
  source 1..107: note = UGX418 light chain variable region sequence

SEQ ID NO: 1806 - protein, 447 aa, synthetic construct; identical to SEQ ID NO: 1250
  source 1..447: note = UGX419 heavy chain sequence

SEQ ID NO: 1807 - protein, 213 aa, synthetic construct; identical to SEQ ID NO: 652
  source 1..213: note = UGX419 light chain sequence

SEQ ID NO: 1808 - protein, 117 aa, synthetic construct; identical to SEQ ID NO: 245
  source 1..117: note = UGX419 heavy chain variable region sequence

SEQ ID NO: 1809 - protein, 107 aa, synthetic construct; identical to SEQ ID NO: 341
  source 1..107: note = UGX419 light chain variable region sequence

SEQ ID NO: 1810 - protein, 447 aa, synthetic construct; identical to SEQ ID NO: 1250
  source 1..447: note = UGX420 heavy chain sequence

SEQ ID NO: 1811 - protein, 213 aa, synthetic construct; identical to SEQ ID NO: 645
  source 1..213: note = UGX420 light chain sequence

SEQ ID NO: 1812 - protein, 117 aa, synthetic construct; identical to SEQ ID NO: 245
  source 1..117: note = UGX420 heavy chain variable region sequence

SEQ ID NO: 1813 - protein, 107 aa, synthetic construct; identical to SEQ ID NO: 325
  source 1..107: note = UGX420 light chain variable region sequence

SEQ ID NO: 1814 - protein, 447 aa, synthetic construct; identical to SEQ ID NO: 1250
  source 1..447: note = UGX421 heavy chain sequence

SEQ ID NO: 1815 - protein, 213 aa, synthetic construct; identical to SEQ ID NO: 648
  source 1..213: note = UGX421 light chain sequence

SEQ ID NO: 1816 - protein, 117 aa, synthetic construct; identical to SEQ ID NO: 245
  source 1..117: note = UGX421 heavy chain variable region sequence

SEQ ID NO: 1817 - protein, 107 aa, synthetic construct; identical to SEQ ID NO: 329
  source 1..107: note = UGX421 light chain variable region sequence

SEQ ID NO: 1818 - protein, 447 aa, synthetic construct; identical to SEQ ID NO: 1250
  source 1..447: note = UGX422 heavy chain sequence

SEQ ID NO: 1819 - protein, 213 aa, synthetic construct; identical to SEQ ID NO: 1111
  source 1..213: note = UGX422 light chain sequence

SEQ ID NO: 1820 - protein, 117 aa, synthetic construct; identical to SEQ ID NO: 245
  source 1..117: note = UGX422 heavy chain variable region sequence

SEQ ID NO: 1821 - protein, 107 aa, synthetic construct; identical to SEQ ID NO: 303
  source 1..107: note = UGX422 light chain variable region sequence

SEQ ID NO: 1822 - protein, 447 aa, synthetic construct; identical to SEQ ID NO: 1250
  source 1..447: note = UGX423 heavy chain sequence

SEQ ID NO: 1823 - protein, 213 aa, synthetic construct; identical to SEQ ID NO: 627
  source 1..213: note = UGX423 light chain sequence

SEQ ID NO: 1824 - protein, 117 aa, synthetic construct; identical to SEQ ID NO: 245
  source 1..117: note = UGX423 heavy chain variable region sequence

SEQ ID NO: 1825 - protein, 107 aa, synthetic construct; identical to SEQ ID NO: 306
  source 1..107: note = UGX423 light chain variable region sequence

SEQ ID NO: 1826 - protein, 447 aa, synthetic construct
  source 1..447: note = UGX424 heavy chain sequence
QVQLVQSGAEVKKPGASVKVSCKASGYTFTNHYMHWVRQAPGQGLEWMGIINPISGSTDNAQKFQGRVTMTRDTSTSTVYMELSSLRSEDTAVYYCARDIVDSFDFWGQGTMVTVSSASTKGPSVFPLAPSSKSTSGGTAALGCLVKDYFPEPVTVSWNSGALTSGVHTFPAVLQSSGLYSLSSVVTVPSSSLGTQTYICNVNHKPSNTKVDKKVEPKSCDKTHTCPPCPAPELLGGPSVFLFPPKPKDTLMISRTPEVTCVVVDVSHEDPEVKFNWYVDGVEVHNAKTKPREEQYNSTYRVVSVLTVLHQDWLNGKEYKCKVSNKALPAPIEKTISKAKGQPREPQVYTLPPSRDELTKNQVSLTCLVKGFYPSDIAVEWESNGQPENNYKTTPPVLDSDGSFFLYSKLTVDKSRWQQGNVFSCSVMHEALHNHYTQKSLSLSPGK

SEQ ID NO: 1827 - protein, 213 aa, synthetic construct; identical to SEQ ID NO: 2
  source 1..213: note = UGX424 light chain sequence

SEQ ID NO: 1828 - protein, 117 aa, synthetic construct
  source 1..117: note = UGX424 heavy chain variable region sequence
QVQLVQSGAEVKKPGASVKVSCKASGYTFTNHYMHWVRQAPGQGLEWMGIINPISGSTDNAQKFQGRVTMTRDTSTSTVYMELSSLRSEDTAVYYCARDIVDSFDFWGQGTMVTVSS

SEQ ID NO: 1829 - protein, 107 aa, synthetic construct; identical to SEQ ID NO: 4
  source 1..107: note = UGX424 light chain variable region sequence

SEQ ID NO: 1830 - protein, 447 aa, synthetic construct
  source 1..447: note = UGX425 heavy chain sequence
QVQLVQSGAEVKKPGASVKVSCKASGYTFTNHYMHWVRQAPGQGLEWMGIINPISGSTENAQKFQGRVTMTRDTSTSTVYMELSSLRSEDTAVYYCARDIVDSFDFWGQGTMVTVSSASTKGPSVFPLAPSSKSTSGGTAALGCLVKDYFPEPVTVSWNSGALTSGVHTFPAVLQSSGLYSLSSVVTVPSSSLGTQTYICNVNHKPSNTKVDKKVEPKSCDKTHTCPPCPAPELLGGPSVFLFPPKPKDTLMISRTPEVTCVVVDVSHEDPEVKFNWYVDGVEVHNAKTKPREEQYNSTYRVVSVLTVLHQDWLNGKEYKCKVSNKALPAPIEKTISKAKGQPREPQVYTLPPSRDELTKNQVSLTCLVKGFYPSDIAVEWESNGQPENNYKTTPPVLDSDGSFFLYSKLTVDKSRWQQGNVFSCSVMHEALHNHYTQKSLSLSPGK

SEQ ID NO: 1831 - protein, 213 aa, synthetic construct; identical to SEQ ID NO: 2
  source 1..213: note = UGX425 light chain sequence

SEQ ID NO: 1832 - protein, 117 aa, synthetic construct
  source 1..117: note = UGX425 heavy chain variable region sequence
QVQLVQSGAEVKKPGASVKVSCKASGYTFTNHYMHWVRQAPGQGLEWMGIINPISGSTENAQKFQGRVTMTRDTSTSTVYMELSSLRSEDTAVYYCARDIVDSFDFWGQGTMVTVSS

SEQ ID NO: 1833 - protein, 107 aa, synthetic construct; identical to SEQ ID NO: 4
  source 1..107: note = UGX425 light chain variable region sequence

SEQ ID NO: 1834 - protein, 447 aa, synthetic construct
  source 1..447: note = UGX426 heavy chain sequence
QVQLVQSGAEVKKPGASVKVSCKASGYTFTNHYMHWVRQAPGQGLEWMGIINPISGSTQNAQKFQGRVTMTRDTSTSTVYMELSSLRSEDTAVYYCARDIVDSFDFWGQGTMVTVSSASTKGPSVFPLAPSSKSTSGGTAALGCLVKDYFPEPVTVSWNSGALTSGVHTFPAVLQSSGLYSLSSVVTVPSSSLGTQTYICNVNHKPSNTKVDKKVEPKSCDKTHTCPPCPAPELLGGPSVFLFPPKPKDTLMISRTPEVTCVVVDVSHEDPEVKFNWYVDGVEVHNAKTKPREEQYNSTYRVVSVLTVLHQDWLNGKEYKCKVSNKALPAPIEKTISKAKGQPREPQVYTLPPSRDELTKNQVSLTCLVKGFYPSDIAVEWESNGQPENNYKTTPPVLDSDGSFFLYSKLTVDKSRWQQGNVFSCSVMHEALHNHYTQKSLSLSPGK

SEQ ID NO: 1835 - protein, 213 aa, synthetic construct; identical to SEQ ID NO: 2
  source 1..213: note = UGX426 light chain sequence

SEQ ID NO: 1836 - protein, 117 aa, synthetic construct
  source 1..117: note = UGX426 heavy chain variable region sequence
QVQLVQSGAEVKKPGASVKVSCKASGYTFTNHYMHWVRQAPGQGLEWMGIINPISGSTQNAQKFQGRVTMTRDTSTSTVYMELSSLRSEDTAVYYCARDIVDSFDFWGQGTMVTVSS

SEQ ID NO: 1837 - protein, 107 aa, synthetic construct; identical to SEQ ID NO: 4
  source 1..107: note = UGX426 light chain variable region sequence

SEQ ID NO: 1838 - protein, 447 aa, synthetic construct; identical to SEQ ID NO: 1202
  source 1..447: note = UGX427 heavy chain sequence

SEQ ID NO: 1839 - protein, 213 aa, synthetic construct; identical to SEQ ID NO: 648
  source 1..213: note = UGX427 light chain sequence

SEQ ID NO: 1840 - protein, 117 aa, synthetic construct; identical to SEQ ID NO: 213
  source 1..117: note = UGX427 heavy chain variable region sequence

SEQ ID NO: 1841 - protein, 107 aa, synthetic construct; identical to SEQ ID NO: 329
  source 1..107: note = UGX427 light chain variable region sequence

SEQ ID NO: 1842 - protein, 447 aa, synthetic construct; identical to SEQ ID NO: 1202
  source 1..447: note = UGX428 heavy chain sequence

SEQ ID NO: 1843 - protein, 213 aa, synthetic construct; identical to SEQ ID NO: 645
  source 1..213: note = UGX428 light chain sequence

SEQ ID NO: 1844 - protein, 117 aa, synthetic construct; identical to SEQ ID NO: 213
  source 1..117: note = UGX428 heavy chain variable region sequence

SEQ ID NO: 1845 - protein, 107 aa, synthetic construct; identical to SEQ ID NO: 325
  source 1..107: note = UGX428 light chain variable region sequence

SEQ ID NO: 1846 - protein, 447 aa, synthetic construct
  source 1..447: note = UGX429 heavy chain sequence
QVQLVQSGAEVKKPGASVKVSCKASGYTFTNHYMHWVRQAPGQGLEWMGIINPFSGSTSNAQKFQGRVTMTRDTSTSTVYMELSSLRSEDTAVYYCARDIIDAFDFWGQGTMVTVSSASTKGPSVFPLAPSSKSTSGGTAALGCLVKDYFPEPVTVSWNSGALTSGVHTFPAVLQSSGLYSLSSVVTVPSSSLGTQTYICNVNHKPSNTKVDKKVEPKSCDKTHTCPPCPAPELLGGPSVFLFPPKPKDTLMISRTPEVTCVVVDVSHEDPEVKFNWYVDGVEVHNAKTKPREEQYNSTYRVVSVLTVLHQDWLNGKEYKCKVSNKALPAPIEKTISKAKGQPREPQVYTLPPSRDELTKNQVSLTCLVKGFYPSDIAVEWESNGQPENNYKTTPPVLDSDGSFFLYSKLTVDKSRWQQGNVFSCSVMHEALHNHYTQKSLSLSPGK

SEQ ID NO: 1847 - protein, 213 aa, synthetic construct; identical to SEQ ID NO: 2
  source 1..213: note = UGX429 light chain sequence

SEQ ID NO: 1848 - protein, 117 aa, synthetic construct
  source 1..117: note = UGX429 heavy chain variable region sequence
QVQLVQSGAEVKKPGASVKVSCKASGYTFTNHYMHWVRQAPGQGLEWMGIINPFSGSTSNAQKFQGRVTMTRDTSTSTVYMELSSLRSEDTAVYYCARDIIDAFDFWGQGTMVTVSS

SEQ ID NO: 1849 - protein, 107 aa, synthetic construct; identical to SEQ ID NO: 4
  source 1..107: note = UGX429 light chain variable region sequence

SEQ ID NO: 1850 - protein, 447 aa, synthetic construct
  source 1..447: note = UGX430 heavy chain sequence
QVQLVQSGAEVKKPGASVKVSCKASGYTFTNHYMHWVRQAPGQGLEWMGIINPYSGSTSNAQKFQGRVTMTRDTSTSTVYMELSSLRSEDTAVYYCARDIIDAFDFWGQGTMVTVSSASTKGPSVFPLAPSSKSTSGGTAALGCLVKDYFPEPVTVSWNSGALTSGVHTFPAVLQSSGLYSLSSVVTVPSSSLGTQTYICNVNHKPSNTKVDKKVEPKSCDKTHTCPPCPAPELLGGPSVFLFPPKPKDTLMISRTPEVTCVVVDVSHEDPEVKFNWYVDGVEVHNAKTKPREEQYNSTYRVVSVLTVLHQDWLNGKEYKCKVSNKALPAPIEKTISKAKGQPREPQVYTLPPSRDELTKNQVSLTCLVKGFYPSDIAVEWESNGQPENNYKTTPPVLDSDGSFFLYSKLTVDKSRWQQGNVFSCSVMHEALHNHYTQKSLSLSPGK

SEQ ID NO: 1851 - protein, 213 aa, synthetic construct; identical to SEQ ID NO: 2
  source 1..213: note = UGX430 light chain sequence

SEQ ID NO: 1852 - protein, 117 aa, synthetic construct
  source 1..117: note = UGX430 heavy chain variable region sequence
QVQLVQSGAEVKKPGASVKVSCKASGYTFTNHYMHWVRQAPGQGLEWMGIINPYSGSTSNAQKFQGRVTMTRDTSTSTVYMELSSLRSEDTAVYYCARDIIDAFDFWGQGTMVTVSS

SEQ ID NO: 1853 - protein, 107 aa, synthetic construct; identical to SEQ ID NO: 4
  source 1..107: note = UGX430 light chain variable region sequence